(19) United States
(12) Patent Application Publication
(10) Pub. No.: US 2025/0368696 A1
(43) Pub. Date: Dec. 4, 2025

(54) WHEAT COMPRISING MALE FERTILITY RESTORER ALLELES

(71) Applicants: Vilmorin & CIE, Paris (FR); Limagrain Europe, Saint Beauzire (FR)

(72) Inventors: Pierrick Varenne, Fontainebleau (FR); Jordi Comadran, Riom (FR); Sébastien Specel, Montpensier (FR); Alain Murigneux, La Roche Blanche (FR); Joanna Melonek, Crawley (AU); Ian Small, Wattle Grove (AU); Pascual Perez, Chanonat (FR); Jorge Duarte, Clermont Ferrand (FR); Jean-Philippe Pichon, Clermont Ferrand (FR); Sylvain Levadoux, Clermont Ferrand (FR); Jérôme Martin, Volvic (FR); François Torney, Mahomet, IL (US)

(73) Assignees: Vilmorin & CIE, Paris (FR); Limagrain Europe, Saint Beauzire (FR)

(21) Appl. No.: 19/244,691

(22) Filed: Jun. 20, 2025

Related U.S. Application Data
(63) Continuation of application No. 16/760,693, filed on Apr. 30, 2020, now Pat. No. 12,398,183.

(30) Foreign Application Priority Data
Oct. 31, 2017 (EP) 17306500.4
Oct. 31, 2017 (EP) 17306501.2
Jan. 12, 2018 (EP) 18305027.7
Aug. 14, 2018 (EP) 18306114.2

(51) Int. Cl. C07K 14/415; C12N 15/82

(52) U.S. Cl. CPC C07K 14/415; C12N 15/8289

(57) ABSTRACT

A wheat transgenic plant carrying restorer of fertility genes specific to T. timopheevii CMS cytoplasm.

[0001] This is a Continuation of application Ser. No. 16/760,693 filed Apr. 30, 2020, which in turn is a national stage of PCT/EP2018/079816, filed Oct. 31, 2018, which claims the benefit of: EP 18306114.2, filed Aug. 14, 2018, EP 17306501.2, filed Oct. 31, 2017, EP17306500.4, filed Oct. 31, 2017, and EP 18305027.7, filed Jan. 12, 2018. The disclosure of the prior applications is hereby incorporated by reference herein in its entirety.

### REFERENCE TO AN ELECTRONIC SEQUENCE LISTING

[0002] The present application contains a Sequence Listing that has been submitted electronically and is hereby incorporated by reference in its entirety. The electronic Sequence Listing is named 19177902_SequenceListing.xml, was created on Jun. 19, 2025, and is 6,085,611 bytes in size.

### TECHNICAL FIELD

[0003] The invention is in the field of plant genetics and plant breeding. The invention more specifically relates to wheat plants carrying restorer of fertility genes specific to T. timopheevii CMS cytoplasm.

### BACKGROUND

[0004] Hybrid production is based on crossing two parental lines to increase heterosis and de facto, increase genetic variability to create new varieties or genotypes with higher yield and better adapted to environmental stresses. Even in a predominantly autogamous species like wheat, research studies have shown that hybrid lines exhibit improved quality and greater tolerance to environmental and biotic stresses.

[0005] In order to promote commercially viable rates of hybrid production, self-fertilization must be avoided, i.e. fertilization of the female organ by the pollen of the same plant. It is desired that the female organ of the female parent is exclusively fertilized with the pollen of the male parent. In order to obtain a reliable and efficient system for producing seeds needed for hybrid production, one generally needs three essential elements: a means to induce male sterility, a means to propagate the sterility, and a means to restore fertility. For example a fully genetically based system is composed of a male-sterile line (female parent), a fertile maintainer line (male parent allowing propagation of the male-sterile line), and a fertility restorer line (male parent for hybrid production).

[0006] Male sterility can be achieved by three different ways. Manual emasculation is the simplest one and is still used in some species where male and female flowers are separated, e.g. corn. However, it is impractical in species like wheat where flowers contain both female and male organs. Male sterility can also be induced by chemical hybridization agents (CHAs) with gametocidic effects. Currently, only a few commercial hybrid wheat cultivars are based on this technology as it can bear substantial financial risks.

[0007] Finally, male sterility can also be induced by genetic means. There are many examples of hybrid systems in corn or sorghum based on male sterility induced by genetic means showing the preponderance of this technology compared to the two mentioned previously. However, in other species which are predominantly self-pollinated like wheat, hybrid production is still a challenge (Longin et al, 2012).

[0008] The first case of male sterility in wheat was observed in 1951 (Kihara, 1951), where it was observed that sterility was caused by incompatibility between the cytoplasm of Aegilops caudata L. and the nucleus of T. aestivum var. erythrospermum. Subsequently research on T. timopheevii cytoplasm showed that this cytoplasm is able to induce sterility in bread wheat (T. aestivum) (Wilson and Ross, 1961, Crop Sci, 1: 191-193). Orf256 was previously identified as a gene specific to the T. timopheevii mitochondrial genome (Rathburn and Hedgcoth, 1991; Song and Hedgcoth, 1994), however, it remains to be shown that orf256 is the genetic determinant of T. timopheevii CMS. It was expected that such a cytoplasm could be used in a hybrid production system. However, major limitations arose from the difficulty in finding a completely dominant and stable fertility restorer gene with no negative side effects (notably on yield).

[0009] Fertility restoration of male sterile plants harboring T. timopheevii CMS cytoplasm (T-CMS cytoplasm) has been reported and eight major restorer loci (designated as Rf1 to Rf8) have been identified and located approximate within the wheat genome. One of the most effective restorer loci is Rf3 (Ma and Sorrells, 1995; Kojima et al, 1997; Ahmed et al 2001; Geyer et al 2016). Two SNP markers allowed the location of the Rf3 locus within a 2 cM fragment on chromosome 1B (Geyer et al, 2016). The author notes that these markers are not diagnostic markers.

[0010] While it is understood that restoration to normal pollen fertility could require two or more Rf loci, it is also well known that modifier loci exist that have either minor effects with low penetrance (Zhou et al 2005, Stojalowski et al 2013) or inhibitory effects on fertility, depending on environmental conditions (Wilson, 1984). It is not yet understood which combination of genes or loci is needed to complete a full restoration of T-CMS in different genetic backgrounds and environmental conditions.

[0011] In this context, the development of technologies that enable a full restoration of pollen fertility is of major importance in wheat. It is therefore the object of this invention to propose suitable fertility restorer genes in wheat for the development of a hybrid production system useful for the seed industry.

### SUMMARY

[0012] A first object of the present disclosure relates to an isolated Rf1 nucleic acid encoding a Rf1 protein restorer of fertility of T. timopheevii CMS cytoplasm, wherein the corresponding amino acid sequence has at least 95% identity, preferably at least 96%, 97%, 98%, 99% or 100% identity to SEQ ID NO:361. An example of Rf1 nucleic acid comprises SEQ ID NO:3119.

[0013] The disclosure also relates to a transgenic wheat plant comprising such Rf1 nucleic acid, and, optionally, one or more nucleic acids comprising Rf3, Rf4 and/or Rf7 restorer allele(s), as transgenic element(s).

[0014] Another aspect relates to a genetically engineered wheat plant comprising such Rf1 nucleic acid, and, optionally, one or more nucleic acids comprising Rf3, Rf4 and/or Rf7 restorer allele(s), as genetically engineered element(s).

[0015] In specific embodiments, said transgenic element(s) or genetically engineered element(s) express polypeptides which restore or improve male fertility to the plant as compared to the parent plant without such transgenic element(s) or genetically engineered element(s).

[0016] Yet another aspect relates to a wheat plant restorer of fertility of T. timopheevii CMS cytoplasm comprising such Rf1 restorer allele, and at least two fertility restorer alleles within the restorer loci chosen amongst Rf3, Rf4 and Rf7, wherein,
[0017] the Rf3 locus is located at most 10 cM from marker cfn1249269 of SEQ ID NO:3205 or marker BS00090770 of SEQ ID NO:3228,
[0018] the Rf7 locus is located at most 10 cM from marker cfn0919993 of SEQ ID NO:3231, and,
[0019] the Rf4 locus is located at most 10 cM from marker cfn0393953 of SEQ ID NO:3233.

[0020] The disclosure also provides methods for producing a transgenic wheat plant as described above, wherein the method comprises the steps of transforming a parent wheat plant with one or more Rf1 nucleic acids encoding protein restorer of T. timopheevii CMS cytoplasm, selecting a plant comprising said one or more nucleic acid(s) as transgene(s), regenerating and growing said wheat transgenic plant.

[0021] Also part of the present disclosure is a method for producing a genetically modified wheat plant as described above, wherein the method comprises the steps of genetically modifying a parent wheat plant to obtain in their genome one or more nucleotide sequence encoding Rf1 protein restorer of T. timopheevii CMS cytoplasm, preferably by genome-editing, selecting a plant comprising said one or more nucleotide sequences as genetically engineered elements, regenerating and growing said wheat genetically engineered plant.

[0022] The disclosure further relates to a method for producing a wheat plant by crossing, said method includes the following:
[0023] providing a first wheat plant comprising one or two restorer allele selected among Rf1, Rf3 and Rf7 restorer alleles,
[0024] crossing said first wheat plant with a second wheat plant comprising one or two restorer alleles selected among Rf1, Rf3 and Rf7 restorer alleles, wherein Rf1, Rf3 and Rf7 restorer alleles are represented at least once in the panel of restorer alleles provided by the first plant and the second plant,
[0025] collecting the F1 hybrid seed,
[0026] obtaining homozygous plants from the F1 plants,
[0027] optionally detecting the presence of the Rf1, Rf3 and Rf7 restorer alleles in the hybrid seed and/or at each generation.

[0028] Preferably in such methods, the fertility score of the obtained wheat plant has a fertility score higher than the parent wheat plant.

[0029] The disclosure also relates to a method for producing a transgenic or genetically engineered wheat plant, wherein the fertility level of said plant is modified, comprising the step of knocking-down Rf1 restorer allele expression, wherein said Rf1 restorer allele comprises a Rf1 nucleic acid.

[0030] The disclosure also relates to the method for producing a wheat hybrid plant comprising the steps of:
[0031] crossing a sterile female comprising the T. timopheevii cytoplasm with a fertile male wheat plant as described above;
[0032] collecting the hybrid seed;
[0033] optionally detecting hybridity level of the hybrid seeds.

[0034] The wheat hybrid plant as obtained by the above methods are also part of the present disclosure.

[0035] The present disclosure also relates to a method of identifying a wheat plant as described above, wherein said wheat plant is identified by detecting the presence of at least one restorer allele Rf1 and, optionally, one or more further restorer alleles selected from the group consisting of Rf3, Rf4 and Rf7.

[0036] Accordingly, nucleic acid probes or primers for the specific detection of the restorer allele Rf1 in a wheat plant, and, optionally, one or more of the Rf3, Rf4, and Rf7 restorer alleles, are also disclosed herein.

[0037] Another aspect of the disclosure relates to a recombinant nucleic acid comprising a Rf1 nucleic acid encoding a Rf1 protein restorer of T. timopheevii CMS cytoplasm, operably linked to regulatory elements and the vectors for use in transformation of a wheat plant, comprising such recombinant nucleic acids.

### DETAILED DESCRIPTION

### Nucleic Acids of the Present Disclosure

[0038] An aspect of the present disclosure relates to the cloning and characterization of genes encoding restorer of fertility proteins that act on T. timopheevi CMS cytoplasm (hereafter referred as Rf genes or nucleic acids) in wheat plants and the use of the corresponding Rf nucleic acids for producing transgenic wheat plants, for modifying wheat plants by genome editing, and/or for detecting such Rf genes in wheat plants.

[0039] Whenever reference to a “plant” or “plants” is made, it is understood that also plant parts (cells, tissues or organs, seed pods, seeds, severed parts such as roots, leaves, flowers, pollen, etc.), progeny of the plants which retain the distinguishing characteristics of the parents (especially, male fertility associated with the claimed Rf nucleic acids), such as seed obtained by selfing or crossing, e.g. hybrid seeds (obtained by crossing two inbred parent plants), hybrid plants and plant parts derived therefrom are encompassed herein, unless otherwise indicated.

[0040] As used herein, the term “wheat plant” refers to species of the genus Triticum as for example, T. aestivum, T. aethiopicum, T. araraticum, T. boeoticum, T. carthlicum, T. compactum, T. dicoccoides, T. dicoccon, T. durum, T. ispahanicum, T. karamyschevii, T. macha, T. militinae, T. monococcum, T. polonicum, T. spelta, T. sphaerococcum, T. timopheevii, T. turanicum, T. turgidum, T. urartu, T. vavilovii, T. zhukovskyi Faegi. Wheat plant also refers to species of the genera Aegilops and Triticale.

[0041] As used herein, the term “restorer of fertility of T. timopheevi CMS cytoplasm” refers to a protein whose expression in a wheat plant comprising T. timopheevi CMS cytoplasm contributes to the restoration of the production of pollen in the Triticum timopheevii CMS system.

[0042] As used herein, the term “allele(s)” means any of one or more alternative forms of a gene at a particular locus. In a diploid, alleles of a given gene are located at a specific location or locus on a chromosome. One allele is present on each chromosome of the pair of homologous chromosomes. The same definition is used for plants bearing a higher level of ploidy like in Triticum gender wherein, for example, T. aestivum is an hexaploid plant.

[0043] As used herein, the term “restorer allele of T. timopheevi CMS cytoplasm” refers to an allele which contributes to the restoration of the production of pollen in the CMS Triticum timopheevii system.

[0044] The restoration of pollen fertility may be partial or complete. The pollen fertility can be evaluated by the pollen fertility tests as described in the Examples below. In particular, the fertility score of F1 wheat plants having CMS-T timopheevii cytoplasm (from test restorer line with CMS hybrids) may be calculated by dividing the total number of seeds threshed from a spike by the number of counted spikelets and may be compared with the fertility scores of a panel of control fertile plants, for example elite inbred lines bearing a normal wheat cytoplasm, grown in the same area and under the same agro-environmental conditions. It is preferred that such panels of lines comprise a set of at least 5 elite inbred lines wherein these lines are representative of the area where the fertility test is achieved. Besides, it is preferred that at least 10 spikes from different individual F1 plants be assessed for a given experiment.

[0045] If the fertility score is not null, then the plant has acquired partial or full restoration of fertility. For each fertility score, a statistical test is calculated to obtain a p-value. Examples of statistical tests are the Anova or mean comparison tests. A p-value below a 5% threshold will indicate that the two distributions are statistically different. Therefore, a significant decrease of the fertility score of the tested wheat plant as compared to the fertility score of the fully fertile control plant is indicative that the F1 plant has not acquired full restoration of fertility (i.e. partial restoration). A similar or higher fertility score is indicative that the F1 plant has acquired full restoration of fertility. In a preferred embodiment, the wheat plant, such as transgenic or genetically engineered wheat plant, according to the present disclosure, has acquired full restoration of fertility.

[0046] The loci of the restorer alleles of T. timopheevi CMS cytoplasm within Rf1, Rf3, Rf4 and Rf7 have been mapped in the present disclosure. The corresponding restorer alleles are designated Rf1, Rf3, Rf4 and Rf7 restorer alleles and have been described in the art. In particular, a wheat plant source of the Rf3 restorer allele includes the commercial following lines: Allezy, Altigo, Altamira, see table 15. A wheat plant source of the Rf4 restorer allele includes the following lines: R113 or L13.

[0047] In specific embodiments, representative alleles of Rf1, Rf3, Rf4 and Rf7 restorer alleles are provided by the seed sample chosen amongst: NCIMB 42811, NCIMB 42812, NCIMB 42813, NCIMB 42814, NCIMB 42815, NCIMB 42816, and NCIMB 42817.

[0048] As used herein, the term “centimorgan” (“cM”) is a unit of measure of recombination frequency. One cM is equal to a 1% chance that a marker at one genetic locus will be separated from a marker at a second locus due to crossing over in a single generation.

[0049] As used herein, the term “chromosomal interval” designates a contiguous linear span of genomic DNA that resides in planta on a single chromosome. The genetic elements or genes located on a single chromosomal interval are physically linked. The size of a chromosomal interval is not particularly limited. In some aspects, the genetic elements located within a single chromosomal interval are genetically linked, typically with a genetic recombination distance of, for example, less than or equal to 20 cM, or alternatively, less than or equal to 10 cM. That is, two genetic elements within a single chromosomal interval undergo recombination at a frequency of less than or equal to 20% or 10%.

[0050] The present disclosure provides nucleic acids and their recombinant forms comprising the coding sequence of either Rf1, Rf3, Rf4, Rf7 or Rf-rye restorer of fertility proteins active in T. timopheevii CMS cytoplasm.

[0051] As used herein, a “recombinant nucleic acid” is a nucleic acid molecule, preferably a DNA molecule, comprising a combination of nucleic acid molecules that would not naturally occur together and is the result of human intervention, e.g., a DNA molecule that is comprised of a combination of at least two DNA molecules heterologous to each other, and/or a DNA molecule that is artificially synthesized and comprises a polynucleotide sequence that deviates from the polynucleotide sequence that would normally exist in nature.

[0052] Such nucleic acids encoding candidate restorer of fertility proteins of T. timopheevii CMS cytoplasm have been isolated as described in the Examples below. Accordingly, a first aspect of the disclosure are nucleic acids encoding a protein restorer of fertility of T. timopheevii having an amino acid sequence at least 95% identical, typically at least 96% identical, to an amino acid sequence chosen amongst any one of SEQ ID NO:1 to SEQ ID NO:1554.

[0053] Percentage of sequence identity as used herein is determined by calculating the number of matched positions in aligned amino acid sequences, dividing the number of matched positions by the total number of aligned amino acids, and multiplying by 100. A matched position refers to a position in which identical amino acids occur at the same position in aligned amino acid sequences. For example, amino acid sequences may be aligned using the CD-hit (settings -c 0.96 -n 5 -G 0 -d 0 -AS 60 -A 105 -g 1, see http://weizhongli-lab.org/cd-hit/).

[0054] The above candidate nucleic acids encoding any one of polypeptides SEQ ID NO: 1 to 1554, can further be assessed for their capacity to restore fertility of sterile wheat plant as described below.

[0055] It is therefore disclosed herein a method for assessing the capacity of a nucleic acid to restore fertility, wherein the method comprises the steps of:
[0056] a. introducing one or more candidate Rf1, Rf3, Rf4, Rf7 and/or Rf-rye nucleic acid encoding a putative amino acid sequence of at least 95% identical to any one of SEQ ID NO1 to SEQ ID NO1554 into a parent wheat sterile plant and T. timopheevii CMS cytoplasm,
[0057] b. selecting the transgenic plant bearing one or more candidate nucleic acid as transgene(s), and
[0058] c. evaluating the fertility of the transgenic plants as compared to the parent wheat sterile plant based on a fertility restoration assay,
[0059] wherein an improvement in the fertility restoration is indicative that said nucleic acid has the capacity to restore fertility.

[0060] In a specific embodiment, the parent wheat sterile plant is the Fielder line bearing the T. timopheevii CMS cytoplasm.

[0061] In another specific embodiment of the above method, the Rf1, Rf3, Rf4, Rf7 and/or Rf-rye candidate nucleic acid sequence is selected from those encoding an amino acid sequence having at least 95% identity, or at least 96% identity, for example 100% identity, to any one of SEQ ID NO1 to SEQ ID NO1554.

[0062] Typically, the Rf1, Rf3, Rf4, Rf7 and/or Rf-rye candidate nucleic acids are selected among the following nucleic acids of SEQ ID NO:1555 to SEQ ID NO:3107 and 3133.

[0063] In a further specific embodiment, where appropriate, the nucleic acid sequence may be optimized for increased expression in the transformed plant. There are a number of optimizations that can be performed at the DNA level, without changing the protein sequence, by conservative codon exchanges which replace one codon by another codon encoding the same amino acid. Besides, the nucleic acid sequence can be modified for cloning purpose. Like for optimization, such modification is achieved without changing the protein sequence.

### Rf1 Nucleic Acids

[0064] In specific embodiment, the nucleic acid of the present disclosure is a Rf1 nucleic acid.

[0065] As used herein, the term “Rf1 nucleic acid” refers to a nucleic acid comprising a gene encoding a Rf1 protein restorer of fertility of T. timopheevii CMS cytoplasm, wherein the corresponding amino acid sequence has at least 95% identity, preferably, 96%, 97%, 98%, 99% or 100% identity to an amino acid sequence selected from the group consisting of SEQ ID NOs1-2, SEQ ID NOs288-290, SEQ ID NOs293-296, SEQ ID NOs343-346, SEQ ID NOs349-354, SEQ ID NOs359, 361 and 362, SEQ ID NOs 396 and 397, SEQ ID NOs428-430, SEQ ID NO517 and 519, SEQ ID NOs752-754, SEQ ID NOs1092, 1093 and 1095, typically, SEQ ID NOs359, 361 and 362 and SEQ ID NO428-430. In a particularly preferred embodiment, the Rf1 nucleic acid encodes an amino acid sequence having at least 95% identity, preferably, 96%, 97%, 98%, 99% or 100% identity to SEQ ID NO:361. Examples of corresponding specific Rf1 nucleic acids are referred to in Table 7.

[0066] In particular, and as shown in Example 6, the inventors have identified that RFL79 sequence of SEQ ID NO:361 (as depicted in Table 7) can restore male fertility of CMS-Fielder plants. Accordingly, in a preferred embodiment, examples of Rf1 nucleic acids comprises the disclosed Rf1 nucleic acid sequences of SEQ ID NO:1913, SEQ ID NO:1914, SEQ ID NO:1915, SEQ ID NO:1916 or SEQ ID NO:3119, preferably a Rf1 nucleic acid comprises SEQ ID NO:3119.

### Rf3 Nucleic Acids

[0067] In specific embodiment, the nucleic acid of the present disclosure is a Rf3 nucleic acid.

[0068] As used herein, the term “Rf3 nucleic acid” refers to a nucleic acid comprising a gene encoding a Rf3 protein restorer of fertility of T. timopheevii CMS cytoplasm, wherein the corresponding amino acid sequence has at least 95% identity, preferably, 96%, 97%, 98%, 99% or 100% identity to an amino acid sequence selected from the group consisting of SEQ ID NOs:124 and 125, SEQ ID NO:147, SEQ ID NO:150, SEQ ID NO:156, SEQ ID NO:158, SEQ ID NO:297, SEQ ID NO:299, SEQ ID NOs:315-321, SEQ ID NOs:379-381, SEQ ID NOs:553 and 554, SEQ ID NOs:557 and 558, SEQ ID NOs:676 and 677, SEQ ID NOs:684 and 685, SEQ ID NOs:696 and 697, SEQ ID NOs:938 and 939 and SEQ ID NOs:1038 and 1039, typically, SEQ ID NOs:315-321, SEQ ID NOs:379-381, SEQ ID NOs:147 and 150, SEQ ID NOs:156 and 158, SEQ ID NOs297 and 299. Preferred Rf3 nucleic acids encode a Rf3 protein restorer of fertility of T. timopheevii CMS cytoplasm, with the corresponding amino acid sequence having at least 95% identity, preferably, 96%, 97%, 98%, 99% or 100% identity to an amino acid sequence selected from the group consisting of SEQ ID NO:158, SEQ ID NO:676 and SEQ ID NO:684. Examples of corresponding specific Rf3 nucleic acids are referred to in Table 7 or further described in Example 12. Typically, examples of specific Rf3 nucleic acids comprises SEQ ID NO:1712, SEQ ID NO:2230, SEQ ID NO:2238, SEQ ID NO:3146, SEQ ID NO:3147 or SEQ ID NO:3148.

### Rf4 Nucleic Acids

[0069] In specific embodiment, the nucleic acid of the present disclosure is a Rf4 nucleic acid.

[0070] As used herein, the term “Rf4 nucleic acid” refers to a nucleic acid comprising a gene encoding a Rf4 protein restorer of fertility of T. timopheevii CMS cytoplasm, wherein the corresponding amino acid sequence has at least 95% identity, preferably, 96%, 97%, 98%, 99% or 100% identity to an amino acid sequence selected from the group consisting of SEQ ID NO:477, and SEQ ID NOs3135-3138, typically SEQ ID NO:477 and SEQ ID NOs3136-3138. Examples of corresponding specific Rf4 nucleic acids are listed in Table 7 and further include any of SEQ ID NO: 2031, and SEQ ID NO:3140-3142.

### Rf7 Nucleic Acids

[0071] In specific embodiment, the nucleic acid of the present disclosure is a Rf7 nucleic acid.

[0072] As used herein, the term “Rf7 nucleic acid” refers to a nucleic acid comprising a gene encoding a Rf7 protein restorer of fertility of T. timopheevii CMS cytoplasm, wherein the corresponding amino acid sequence has at least 95% identity, preferably, 96%, 97%, 98%, 99% or 100% identity to an amino acid sequence selected from the group consisting of SEQ ID NOs:240-243, SEQ ID NOs303-305, SEQ ID NO:363, SEQ ID NOs375-377, SEQ ID NOs497-499, SEQ ID NO:516, SEQ ID NOs709-711, SEQ ID NO:768, typically SEQ ID NO:363, SEQ ID NO:516 and SEQ ID NO:768. Examples of corresponding specific Rf7 nucleic acids are referred to in Table 7.

### Rf-Rye Nucleic Acids

[0073] In specific embodiment, the nucleic acid of the present disclosure is a Rf-rye nucleic acid.

[0074] As used herein, the term “Rf-rye nucleic acid” refers to a nucleic acid comprising a gene encoding a Rf-rye protein restorer of fertility of T. timopheevii CMS cytoplasm, wherein the corresponding amino acid sequence has at least 95% identity, preferably, 96%, 97%, 98%, 99% or 100% identity to an amino acid sequence selected from the group consisting of SEQ ID NO:227, SEQ ID NO:378 and SEQ ID NO:859. Examples of corresponding specific Rf-rye nucleic acids are referred to in Table 7.

### Rf Nucleic Acids as Transgene

[0075] The present disclosure more specifically relates to DNA molecules including one or more of the Rf1, Rf3, Rf4, Rf7 or Rf-rye nucleic acids. In particular, the disclosure relates to any DNA molecule resulting from the insertion of a transgene in the wheat plant, said transgene including one or more of the above described Rf1, Rf3, Rf4, Rf7 or Rf-rye nucleic acids, and which insertion results in the expression of corresponding RNA and/or protein in the wheat plant.

[0076] Also part of the present disclosure is a nucleic acid that has been extracted from cells, or tissues, or homogenate from a plant or seed or plant tissue; or can be produced as an amplicon from extracted DNA or RNA from cells, or tissues, or homogenate from a plant or seed or plant tissue, any of which is derived from such materials derived from a plant comprising such nucleic acid as disclosed above.

[0077] As used herein, the term “transgene” or “transgenic element” refers to the nucleic acid (e.g. DNA molecule) incorporated into a host cell's genome. The term “transgene” or ‘transgenic element” refers in particular to a sequence that is not normally present in a given host genome in the genetic context in which the sequence is currently found. In this respect, the sequence may be native to the host genome, but be rearranged with respect to other genetic sequences within the host genomic sequence. For example, the transgene is rearranged at a different locus as compared to the native gene.

[0078] Said one or more transgenic element(s) enables the expression of polypeptides which restore or improve male fertility to the plant having T. timopheevii CMS cytoplasm, as compared to the parent plant which do not comprise the transgenic element.

[0079] A particular transgenic element is the recombinant nucleic acid as defined above, for example Rf1 nucleic acids as defined above. In specific embodiments, a transgenic element includes an Rf nucleic acid under the control of a constitutive promoter, such as the ZmUbi promoter.

### Recombinant Nucleic Acids for Use in Transforming Wheat Plants

[0080] Such Rf nucleic acids as defined above are also useful to transform or genetically modify wheat plant, in particular wheat plant which does not have one or more of the fertility restoration alleles Rf1, Rf3, Rf4, Rf7 and Rf-rye.

[0081] Another aspect of the present disclosure relates to a vector for use in transforming wheat plant, comprising one or more of Rf1, Rf3, Rf4, Rf7 and Rf-rye nucleic acids as described above.

[0082] Vectors for use in transforming wheat plant includes at least the coding sequence of the corresponding protein restorer of fertility (either naturally occurring coding sequence, or improved sequence, such as codon optimized sequence), such coding sequence being operably linked to a regulatory element such as a promoter.

[0083] The term “promoter” as used herein refers to a region of DNA upstream of the coding sequence (upstream of start codon) and including DNA regions for recognition and binding of RNA polymerase and other proteins to initiate transcription at the start codon. Examples of constitutive promoters useful for expression include the 35S promoter or the 19S promoter (Kay et al, 1987), the rice actin promoter (McElroy et al, 1990), the pCRV promoter (Depigny-This et al, 1992), the CsVMV promoter (Verdaguer et al. 1996), the ubiquitin 1 promoter of maize (Christensen and Quail, 1996), the regulatory sequences of the T-DNA of Agrobacterium tumefaciens, including mannopine synthase, nopaline synthase, octopine synthase.

[0084] Promoters may be «tissue-preferred», i.e. initiating transcription in certain tissues or “tissue-specific”, i.e. initiating transcription only in certain tissues. Examples of such promoters are DHN12, LTR1, LTP1 specific of the embryo, SS1 specific of the phloem, OSG6B specific of the tapetum (Gotz et al 2011 and Jones 2015).

[0085] Other suitable promoters could be used. It could be an inducible promoter, a developmentally regulated promoter. An “inducible” promoter initiates transcription under some environmental control or any stress-induced like for example the abiotic stress-induced RD29, COR14b (Gotz et al, 2011).

[0086] Constitutive promoters may be used, such as the ZmUbi promoter, typically the ZmUbi promoter of SEQ ID NO:3134. Finally, promoter of SEQ ID NO:3114, SEQ ID NO:3123 and SEQ ID NO:3113 corresponding to pTaRFL46, 79 and 104 can also be used.

[0087] In specific embodiments, the Rf1, Rf3, Rf4, Rf7 or Rf-rye nucleic acids of the present disclosure are operably linked to heterologous promoters, i.e. a promoter which is not the natural promoter of the corresponding Rf1, Rf3, Rf4, Rf7 or Rf-rye nucleic acids as found in wheat. Typical recombinant constructs of Rf3 nucleic acids with heterologous promoters include any one of SEQ ID NO:3150-3153, and any one of SEQ ID NO:3156-SEQ ID NO:3159. Typical recombinant constructs of Rf1 nucleic acids with heterologous promoters includes SEQ ID NO:3122, or a nucleic acid of SEQ ID NO:3119 under the regulation of the promoter of SEQ ID NO:2123.

[0088] The vector may further comprise additional elements including selection gene marker, operably linked to regulatory element, that allows to select the transformed plant cells containing the vector, comprising the nucleic acids of the present disclosure as transgene.

[0089] The vector may further comprise additional elements including counter-selection gene marker, operably linked to regulatory element that allows to counter-select the transformed plant cells which do not have maintained the counter-selection gene marker in its genome.

[0090] In a specific embodiment, the vector according to the present disclosure may be vector suitable for Agrobacterium-mediated transformation, in particular Agrobacterium tumefaciens or Agrobacterium rhizogenes mediated transformation, as described in the next section.

### Methods for Producing a Wheat Transgenic Plant

[0091] Another aspect of the present disclosure relates to the use of the above-described nucleic acids for producing wheat transgenic plant expressing protein restorer of fertility.

[0092] The term “transgenic plant” refers to a plant comprising such a transgene. A “transgenic plant” includes a plant, plant part, a plant cell or seed whose genome has been altered by the stable integration of recombinant DNA. A transgenic plant includes a plant regenerated from an originally-transformed plant cell and progeny transgenic plants from later generations or crosses of a transformed plant. As a result of such genomic alteration, the transgenic plant is distinctly different from the related wild type plant. An example of a transgenic plant is a plant described herein as comprising one or more of the Rf1, Rf3, Rf4, Rf7 or Rf-rye nucleic acids, typically as transgenic elements. For example, the transgenic plant includes one or more Rf1, Rf3, Rf4, Rf7 or Rf-rye nucleic acids as transgene, inserted at loci different from the native locus of the corresponding Rf gene(s). Accordingly, it is herein disclosed a method for producing a wheat transgenic plant, wherein the method comprises the steps of
[0093] (i) transforming a parent wheat plant with Rf1, Rf3, Rf4, Rf7 and/or Rf-rye nucleic acids,
[0094] (ii) selecting a plant comprising said one or more nucleic acid(s) as transgene(s),
[0095] (iii) regenerating and
[0096] (iv) growing said wheat transgenic plant.

[0097] For transformation methods within a plant cell, one can cite methods of direct transfer of genes such as direct micro-injection into plant embryos, vacuum infiltration or electroporation, direct precipitation by means of PEG or the bombardment by gun of particules covered with the plasmidic DNA of interest.

[0098] It is preferred to transform the plant cell with a bacterial strain, in particular Agrobacterium, in particular Agrobacterium tumefaciens. In particular, it is possible to use the method described by Ishida et al. (Nature Biotechnology, 14, 745-750, 1996) for the transformation of monocotyledons.

[0099] Descriptions of Agrobacterium vector systems and methods for Agrobacterium-mediated gene transfer are provided by Moloney et al., Plant Cell Reports 8:238 (1989). See also, U.S. Pat. No. 5,591,616 issued Jan. 7, 1997.

[0100] Alternatively, direct gene transfer may be used. A generally applicable method of plant transformation is microprojectile-mediated transformation wherein DNA is carried on the surface of microprojectiles measuring 1 to 4 micron. The expression vector is introduced into plant tissues with a biolistic device that accelerates the microprojectiles to speeds of 300 to 600 m/s which is sufficient to penetrate plant cell walls and membranes. Sanford et al., Part. Sci. Technol. 5:27 (1987), Sanford, J. C., Trends Biotech. 6:299 (1988), Klein et al., BioTechnology 6:559-563 (1988), Sanford, J. C., Physiol Plant 7:206 (1990), Klein et al., BioTechnology 10:268 (1992). Several target tissues can be bombarded with DNA-coated microprojectiles in order to produce transgenic plants, including, for example, callus (Type I or Type II), immature embryos, and meristematic tissue.

[0101] Following transformation of wheat target tissues, expression of the selectable marker genes allows for preferential selection of transformed cells, tissues and/or plants, using regeneration and selection methods now well known in the art.

[0102] The foregoing methods for transformation would typically be used for producing a transgenic plant including one or more of Rf1, Rf3, Rf4, Rf7 or Rf Rye nucleic acids as transgenic element(s).

[0103] The transgenic plant could then be crossed, with another (non-transformed or transformed) inbred line, in order to produce a new transgenic line. Alternatively, a genetic trait which has been engineered into a particular line using the foregoing transformation techniques could be moved into another line using traditional backcrossing techniques that are well known in the plant breeding arts. For example, a backcrossing approach could be used to move an engineered trait from a public, non-elite inbred line into an elite inbred line, or from an inbred line containing a foreign gene in its genome into an inbred line or lines which do not contain that gene. As used herein, “crossing” can refer to a simple X by Y cross, or the process of backcrossing, depending on the context.

[0104] When the term transgenic wheat plant is used in the context of the present disclosure, this also includes any wheat plant including, as a transgenic element one or more of Rf1, Rf3, Rf4, Rf7 or Rf-rye nucleic acids and wherein one or more desired traits have further been introduced through backcrossing methods, whether such trait is a naturally occurring one or a transgenic one. Backcrossing methods can be used with the present invention to improve or introduce one or more characteristic into the inbred. The term backcrossing as used herein refers to the repeated crossing of a hybrid progeny back to one of the parental wheat plants. The parental wheat plant which contributes the gene or the genes for the desired characteristic is termed the nonrecurrent or donor parent. This terminology refers to the fact that the nonrecurrent parent is used one time in the backcross protocol and therefore does not recur. The parental wheat plant to which the gene or genes from the nonrecurrent parent are transferred is known as the recurrent parent as it is used for several rounds in the backcrossing protocol (Fehr et al, 1987).

[0105] In a typical backcross protocol, the recurrent parent is crossed to a second nonrecurrent parent that carries the gene or genes of interest to be transferred. The resulting progeny from this cross are then crossed again to the recurrent parent and the process is repeated until a wheat plant is obtained wherein all the desired morphological and physiological characteristics of the recurrent parent are recovered in the converted plant in addition to the gene or genes transferred from the nonrecurrent parent. It should be noted that some, one, two, three or more, self-pollination and growing of a population might be included between two successive backcrosses.

### Methods for Producing a Wheat Genetically Engineered Plant

[0106] An aspect of the present disclosure relates to a DNA fragment of the corresponding protein restorer of fertility (either naturally occurring coding sequence, or improved sequence, such as codon optimized sequence) combined with genome editing tools (such TALENs, CRISPR-Cas, Cpf1 or zing finger nuclease tools) to target the corresponding Rf restorer alleles within the wheat plant genome by insertion at any locus in the genome or by partial or total allele replacement at the corresponding locus.

[0107] In particular, the disclosure relates to a genetically modified (or engineered) wheat plant, wherein the method comprises the steps of genetically modifying a parent wheat plant to obtain in their genome one or more nucleotide sequence encoding protein restorer of T. timopheevii CMS cytoplasm Rf1, Rf3, Rf4 or Rf7 as disclosed herein, preferably by genome-editing, selecting a plant comprising said one or more nucleotide sequences as genetically engineered elements, regenerating and growing said wheat genetically engineered plant.

[0108] As used herein, the term “genetically engineered element” refers to a nucleic acid sequence present in the genome of a plant and that has been modified by mutagenesis or by genome-editing tools, preferentially by genome-editing tools. In specific embodiments, a genetically engineered element refers to a nucleic acid sequence that is not normally present in a given host genome in the genetic context in which the sequence is currently found but is incorporated in the genome of plant by use of genome-editing tools. In this respect, the sequence may be native to the host genome, but be rearranged with respect to other genetic sequences within the host genomic sequence. For example, the genetically engineered element is a gene that is rearranged at a different locus as compared to a native gene. Alternatively, the sequence is a native coding sequence that has been placed under the control of heterologous regulatory sequences. Other specific examples are described hereafter. The term “genetically engineered plant” or “genetically modified plant” refers to a plant comprising such genetically engineered element. A “genetically engineered plant” includes a plant, plant part, a plant cell or seed whose genome has been altered by the stable integration of recombinant DNA. As used herein, the term “genetically engineered plant” further includes a plant, plant part, a plant cell or seed whose genome has been altered by genome editing techniques. A genetically engineered plant includes a plant regenerated from an originally-engineered plant cell and progeny of genetically engineered plants from later generations or crosses of a genetically engineered plant. As a result of such genomic alteration, the genetically engineered plant is distinctly different from the related wild type plant. An example of a genetically engineered plant is a plant described herein as comprising one or more of the Rf1, Rf3, Rf4, Rf7 or Rf-rye nucleic acids. For example, the genetically engineered plant includes one or more Rf1, Rf3, Rf4, Rf7 or Rf-rye nucleic acids as genetically engineered elements, inserted at loci different from the native locus of the corresponding Rf gene(s).

[0109] In specific embodiments, said genetically engineered plants do not include plants which could be obtained exclusively by means of an essentially biological process.

[0110] Said one or more genetically engineered element(s) enables the expression of polypeptides which restore or improve male fertility to the plant having T. timopheevii CMS cytoplasm, as compared to the parent plant which do not comprise the genetically engineered element(s).

[0111] A particular genetically engineered element is the Rf nucleic acid as defined above, for example Rf1 nucleic acids as defined above. In specific embodiments, a genetically engineered element includes an Rf nucleic acid under the control of expression elements as promoter and/or terminator. Suitable promoter can be a constitutive promoter, such as the ZmUbi promoter or an endogenous Rf promoter native or modified.

[0112] Another aspect of the disclosure relates to a genetically engineered wheat plant, which comprises the modification by point mutation insertion or deletion of one or few nucleotides of an allele sequence rf or Rf, as genetically engineered element, into the respectively Rf or rf allele, by any of the genome editing tools including base-editing tool as described in WO2015089406 or by mutagenesis.

[0113] The present disclosure further includes methods for modifying fertility level in a plant by genome editing, comprising providing a genome editing tool capable of replacing partially or totally a rf1, rf3, rf4, rf7 or rf-rye non-restorer allele sequence or form in a wheat plant by its corresponding Rf1, Rf3, Rf4, Rf7 or Rf-rye restorer allele sequence as disclosed herein.

[0114] The term “rf non-restorer allele sequence or form” can be related to the presence in the genome of a rf non-restorer allele or to the absence in the genome of any rf or Rf allele. For example, in the rf3/Rf3 system, one wheat non-restorer line can be characterized by the presence of a rf3 allele sequence while another non-restorer line is characterized by the absence of any Rf3 or rf3 allelic sequence. The Rf3 restorer plant will be characterized by the presence of the Rf3 allele sequence in the genome. In the case of the rf4/Rf4 system, the non-restorer plant is characterized by the absence of any rf4 or Rf4 allelic forms while the Rf4 restorer plant will be characterized by the presence in the genome of the Rf4 gene sequence.

[0115] In specific embodiments, methods for modifying fertility level in a plant by genome editing comprises providing a genome editing tool capable of replacing or modifying a rf3 non-restorer allele to obtain a Rf3 restorer allele comprising SEQ ID NO:3146 (RFL29a). In other specific embodiments, rf3 non-restorer allele may comprise RFL29c characterized by a frameshift compared to RFL29a nucleotide sequence as shown in Example 22 and FIG. 12 and SEQ ID NO:3457.

[0116] The disclosure further includes methods for modifying fertility level in a plant introducing the endogenous promoter of a restorer Rf gene in order to increase the expression of the corresponding endogenous Rf gene either by genome-editing or by mutagenesis.

[0117] In a specific embodiment, the disclosure includes methods for modifying fertility level in a plant by genome editing of a weak fertile plant by modifying the 5′UTR sequence of the Rf3 “weak” RFL29b allele which 5′UTR region includes a 163 bp insertion to be deleted as shown in example 15.

[0118] In a further specific embodiment, the invention includes a method for modifying fertility level in a plant by mutagenesis or by genome editing the endogenous promoter of a restorer Rf gene in order to increase the expression of the endogenous Rf gene. As an example, the sequence of proTaRFL79 depicted in SEQ ID No3123 could be mutated or edited to increase RFL79 protein level.

[0119] In another specific embodiment, whenever a stronger promoter is located upstream to the promoter of the Rf restorer gene, a deletion of that promoter and the region upstream can be achieved in order to juxtapose the stronger promoter to the Rf gene.

[0120] In a specific embodiment, one rf non-restorer allele is replaced partially or totally by anyone of the Rf1, Rf3, Rf4, Rf7 or Rf-rye restorer allele. In such disclosure, a non-restorer rf1 allele could be replaced, for example, by a Rf3, or a Rf4, or a Rf7, or Rf-rye allele.

[0121] In another aspect of the disclosure, at least one restorer allele from among Rf1, Rf3, Rf4, Rf7 and Rf-Rye can be integrated at one or more target sites in the wheat plant genome, typically in order to get an expression of said restorer alleles. Said expression can be achieved either by taking advantage of the presence at the targeting locus of a promoter, more specifically a strong promoter, and/or a terminator and by targeting with the Rf allele said expression elements. In a specific embodiment, the endogenous Rf allele is deleted from one first locus and further integrated downstream a suitable promoter at a second locus in the same plant genome.

[0122] In a specific embodiment of the invention, the target sites can be located in the Rf1, Rf3, Rf4 and/or Rf7 locus as defined in example 17. In a more specific embodiment, the target sites can either be the Rf1, Rf3, Rf4, Rf7 or Rf-Rye endogenous gene sequence or any other target sites different from the Rf1, Rf3, Rf4, Rf7 or Rf-Rye endogenous gene sequences.

[0123] In a preferred aspect of the disclosure, a wheat plant can comprise in its genome, at only one locus, the Rf1, Rf3 and Rf7 restorer alleles.

[0124] Such genome editing tool includes without limitation targeted sequence modification provided by double-strand break technologies such as, but not limited to, meganucleases, ZFNs, TALENs (WO2011072246) or CRISPR CAS system (including CRISPR Cas9, WO2013181440), Cpf1 or their next generations based on double-strand break technologies using engineered nucleases.

### Method for Decreasing the Fertility Level in Wheat Plant:

[0125] Alternatively, the present disclosure further includes methods for modifying fertility level in a plant by reverting a restorer line comprising a Rf allele to a maintainer line comprising a rf allele. Such method could be used for any plant comprising a Rf allele, including Rf1. It is of particular interest in the case of a hybrid production system based on Rf3 restorer allele, wherein for example, the Rf3 sequence is RFL29a and the rf3 sequence is RFL29c.

[0126] The decrease in fertility could be obtained by knocking-down Rf gene or allele as described below.

[0127] More specifically, the method can correspond first to an inhibition of the expression by RNAi directed against the Rf allele of interest or by impairing the promoter function of the Rf allele either by mutagenesis or by genome editing.

[0128] In another aspect, the fertility level decrease is obtained by mutagenesis, classically induced with mutagenic agents, or by genome editing technologies to impair the protein function, by deleting totally or partially the gene, or by modifying the gene sequence reading frame to impair protein translation.

[0129] In a further aspect, the disclosure relates to the transgenic or genetically engineered wheat plant with decreased fertility level obtained by the methods described above.

### The Transgenic or Genetically Engineered Wheat Plant of the Present Disclosure

[0130] Another aspect of the present disclosure relates to a transgenic or genetically engineered wheat plant comprising one or more Rf1, Rf3, Rf4, Rf7 or Rf-rye nucleic acid(s) as described in the previous sections, as transgenic or genetically engineered elements respectively.

[0131] Said transgenic or genetically engineered plant may be obtained by the methods described in the previous section.

[0132] The transgenic or genetically engineered plants of the present disclosure may advantageously be used as parent plant in order to produce fertile wheat transgenic or genetically engineered plant restorer of T. timopheevii CMS cytoplasm. In particular, in specific embodiment, the wheat transgenic or genetically engineered plant is a fertile wheat transgenic or genetically engineered plant restorer of T. timopheevii CMS cytoplasm. Typically, a transgenic or genetically engineered wheat plant according to the present disclosure comprises a combination of at least two different transgenic or genetically engineered elements selected from the group consisting of Rf1, Rf3, Rf4, Rf7 and Rf-rye encoding nucleic acids.

[0133] The transgenic or genetically engineered wheat plant as disclosed herein may express such protein restorer of fertility Rf1, Rf3, Rf4, Rf7 and/or Rf-Rye together as the result of the transgene's expression or expression of the genetically engineered element and may additionally express other protein restorer of fertility, as the result of naturally occurring alleles.

[0134] In one embodiment, said combination of at least two, three or four of Rf1, Rf3, Rf4, Rf7 and Rf-rye nucleic is found in the same locus in the genome of the transgenic or genetically engineered plant. In other embodiments, the corresponding nucleic acids of the combination are located in distinct loci. In one specific embodiment, said combination may be obtained by crossing transgenic plants of the present disclosure each bearing one nucleic acid of the combination as a transgene at a distinct locus.

[0135] Typically, said transgenic or genetically engineered plant includes the following combination of nucleic acids as transgenic or genetically engineered elements:
[0136] a. a Rf1 nucleic acid, preferably encoding an amino acid sequence having at least 95% identity or at least 96% identity with any one of SEQ ID NOs359, 361, 362 or SEQ ID NOs428-430, preferably SEQ ID NO:361, typically a Rf1 nucleic acid comprises SEQ ID NO:3119, and Rf3 nucleic acid, preferably encoding an amino acid sequence having at least 95% identity or at least 96% identity with any one of SEQ ID NOs:315-321, SEQ ID NOs:379-381, SEQ ID NOs:147 and 150, SEQ ID NOs:156 and 158, SEQ ID NOs297 and 299, SEQ ID NO:676 and SEQ ID NO:684,
[0137] b. a Rf1 nucleic acid, preferably encoding an amino acid sequence having at least 95% identity or at least 96% identity with any one of SEQ ID NOs359, 361, 362 or SEQ ID NOs428-430, preferably SEQ ID NO:361, typically a Rf1 nucleic acid comprises SEQ ID NO:3119, and Rf7 nucleic acid, preferably encoding an amino acid sequence having at least 95% identity or at least 96% identity with any one of SEQ ID NO:363, SEQ ID NO:516 and SEQ ID NO:768,
[0138] c. a Rf1 nucleic acid, preferably encoding an amino acid sequence having at least 95% identity or at least 96% identity with any one of SEQ ID NOs359, 361, 362 or SEQ ID NOs428-430, preferably SEQ ID NO:361, typically a Rf1 nucleic acid comprises SEQ ID NO:3119, and Rf-rye nucleic acid, preferably encoding an amino acid sequence having at least 95% identity or at least 96% identity, with any one of SEQ ID NO:227, SEQ ID NO:378 and SEQ ID NO:859,
[0139] d. a Rf3 nucleic acid, preferably encoding an amino acid sequence having at least 95% identity or at least 96% identity with any one of SEQ ID NOs:315-321, SEQ ID NOs:379-381, SEQ ID NOs:147 and 150, SEQ ID NOs:156 and 158, SEQ ID NOs297 and 299, SEQ ID NO:676 and SEQ ID NO:684, and Rf7 nucleic acid, preferably encoding an amino acid sequence having at least 95% identity or at least 96% identity with SEQ ID NO:363, SEQ ID NO:516 and SEQ ID NO:768,
[0140] e. a Rf3 nucleic acid, preferably encoding an amino acid sequence having at least 95% identity or at least 96% identity with any one of SEQ ID NOs:315-321, SEQ ID NOs:379-381, SEQ ID NOs:147 and 150, SEQ ID NOs:156 and 158, SEQ ID NOs297 and 299, SEQ ID NO:676 and SEQ ID NO:684, and Rf-rye nucleic acid, preferably encoding an amino acid sequence having at least 95% identity or at least 96% identity with any one of SEQ ID NO:227, SEQ ID NO:378 and SEQ ID NO:859,
[0141] f. a Rf7 nucleic acid, preferably encoding an amino acid sequence having at least 95% identity or at least 96% identity with SEQ ID NO:363, SEQ ID NO:516 and SEQ ID NO:768, and Rf-rye nucleic acid, preferably encoding an amino acid sequence having at least 95% identity or at least 96% identity with any one of SEQ ID NO:227, SEQ ID NO:378 and SEQ ID NO:859,
[0142] g. a Rf1 nucleic acid, preferably encoding an amino acid sequence having at least 95% identity or at least 96% identity with any one of SEQ ID NOs359, 361, 362 or SEQ ID NOs428-430, preferably SEQ ID NO:361, typically a Rf1 nucleic acid comprises SEQ ID NO:3119, and Rf3 nucleic acid, preferably encoding an amino acid sequence having at least 95% identity or at least 96% identity with any one of SEQ ID NOs:315-321, SEQ ID NOs:379-381, SEQ ID NOs:147 and 150, SEQ ID NOs:156 and 158, SEQ ID NOs297 and 299, SEQ ID NO:676 and SEQ ID NO:684, and Rf7 nucleic acid, preferably encoding an amino acid sequence having at least 95% identity or at least 96% identity with any one of SEQ ID NO:363, SEQ ID NO:516 and SEQ ID NO:768;
[0143] h. a Rf1 nucleic acid, preferably encoding an amino acid sequence having at least 95% identity or at least 96% identity with any one of SEQ ID NOs359, 361, 362 or SEQ ID NOs428-430, preferably SEQ ID NO:361, typically a Rf1 nucleic acid comprises SEQ ID NO:3119, and Rf3 nucleic acid, preferably encoding an amino acid sequence having at least 95% identity or at least 96% identity with any one of SEQ ID NOs:315-321, SEQ ID NOs:379-381, SEQ ID NOs:147 and 150, SEQ ID NOs:156 and 158, SEQ ID NOs297 and 299, SEQ ID NO:676 and SEQ ID NO:684, and Rf-rye nucleic acid, preferably encoding an amino acid sequence having at least 95% identity, or at least 96% identity, with any one of SEQ ID NO:227, SEQ ID NO:378 and SEQ ID NO:859;
[0144] i. a Rf1 nucleic acid, preferably encoding an amino acid sequence having at least 95% identity, for example at least 96% identity with any one of SEQ ID NOs359, 361, 362 or SEQ ID NOs428-430, preferably SEQ ID NO:361, typically a Rf1 nucleic acid comprises SEQ ID NO:3119, and Rf7 nucleic acid of Claim 4, preferably encoding an amino acid sequence having at least 95% identity or at least 96% identity with any one of SEQ ID NO:363, SEQ ID NO:516 and SEQ ID NO:768, and Rf-rye nucleic acid, preferably encoding an amino acid sequence having at least 95% identity or at least 96% identity, with any one of SEQ ID NO:227, SEQ ID NO:378 and SEQ ID NO:859; or,
[0145] j. a Rf3 nucleic acid, preferably encoding an amino acid sequence having at least 95% identity or at least 96% identity with any one of SEQ ID NOs:315-321, SEQ ID NOs:379-381, SEQ ID NOs:147 and 150, SEQ ID NOs:156 and 158, SEQ ID NOs297 and 299, SEQ ID NO:676 and SEQ ID NO:684, and Rf7 nucleic acid, preferably encoding an amino acid sequence having at least 95% identity or at least 96% identity with any one of SEQ ID NO:363, SEQ ID NO:516 and SEQ ID NO:768, and Rf-rye nucleic acid, preferably preferably encoding an amino acid sequence having at least 95% identity or at least 96% identity with any one of SEQ ID NO:227, SEQ ID NO:378 and SEQ ID NO:859.

[0146] In other specific embodiments, said transgenic or genetically engineered plant further includes a Rf4 nucleic acid encoding an amino acid sequence having at least 95% identity to any one of SEQ ID NOs:477, and SEQ ID NOs3135-3138 in addition to any one of the above defined combination of Rf1, Rf3, Rf7 and/or Rf-Rye nucleic acids as defined in the previous paragraph, as transgenic elements.

[0147] The disclosure also relates to hybrid wheat plants which can be produced by crossing a transgenic or genetically engineered wheat plant restorer of fertility according to the present disclosure as described above with a second plant.

[0148] In certain embodiments, the wheat plant according to the disclosure is alloplasmic and comprises the T. timopheevii cytoplasm.

[0149] For example, a hybrid wheat plant may be obtained by crossing a wheat plant restorer of fertility according to the present disclosure as described above, preferably comprising Rf1, Rf3, Rf4, Rf7 or Rf-rye nucleic acids, and a wheat plant which does not express corresponding Rf1, Rf3, Rf4, Rf7 or Rf-rye protein restorer of fertility.

[0150] It is also disclosed herein a method for producing a wheat hybrid transgenic or genetically engineered plant comprising the steps of:
[0151] a. crossing a sterile female wheat plant comprising the T. timopheevii cytoplasm with a fertile male transgenic or genetically engineered wheat plant restorer of fertility of the present disclosure as described above;
[0152] b. collecting the hybrid seed;
[0153] c. optionally detecting the presence of T. timopheevii cytoplasm, and/or at least one or more of the Rf nucleic acids chosen amongst Rf1, Rf3, Rf4, Rf7 and Rf-rye in the hybrid seed, as transgenic elements or genetically engineered elements; and,
[0154] d. optionally detecting hybridity level of the hybrid seed.

[0155] Therefore, it is also disclosed herein the wheat transgenic or genetically engineered plants or lines according to the present disclosure developed to obtain such hybrid plants. Such transgenic or genetically engineered plants or lines typically comprise the cytoplasmic elements necessary for the implementation of the corresponding hybrid system. Preferably, the transgenic or genetically engineered plants or lines comprise a combination of at least two, three or four of Rf1, Rf3, Rf4, Rf7 and Rf-rye nucleic acids, and T. timopheevii cytoplasm.

[0156] Alternatively, the detection of the presence of T. timopheevii cytoplasm and of at least one or more of the Rf nucleic acids chosen amongst Rf1, Rf3, Rf4, Rf7 and Rf-rye (step “c” of the method described above) can be performed on the parent lines in order to check their genotype before to start the cross (step “a”).

[0157] In a certain embodiment of the disclosure, the male wheat plant is taller than the female wheat plant. This can be achieved by using male plant bearing Rht alleles that allows to obtain the size differences. Optionally, the disclosure further comprises the step of to applying an herbicide to the fertile plants standing above the height of the shorter female plants, and further optionally, comprises the step of harvesting the seeds and selecting the seeds to remove undesirable self-fertilized male seeds, using a morphological character and/or a phenotypic character like size, shape, color etc. . . . . An example of such method for hybrid production is described in WO2015135940.

[0158] The T-CMS cytoplasm can be detected either phenotypically wherein a plant bearing rf genes and a T-CMS cytoplasm will be sterile or by molecular means able to detect the orf256 gene as described in Rathburn and Hedgcoth, 1991 and Song and Hedgcoth, 1994.

[0159] The disclosure also relates to a method for improving the level of fertility restoration of a parent wheat plant bearing a fertility level lower than a full restoration level, comprising the steps of transforming said parent wheat plant with a vector comprising a Rf1, Rf3, Rf4, Rf7 and/or Rf-rye nucleic acid as described above, or genetically engineering said Rf1, Rf3, Rf4, Rf7 and/or Rf-rye nucleic acids in said wheat plant. The method further comprises the step of selecting a transgenic or genetically engineered wheat plant comprising said Rf1, Rf3, Rf4, Rf7 and/or Rf-rye nucleic acid(s) as a transgene or genetically engineered element, preferably Rf1, Rf3 and Rf4, regenerating and growing said transgenic or genetically engineered wheat plant, wherein said transgenic or genetically engineered wheat plant has an improved fertility restoration level as compared to the parent plant.

[0160] The disclosure further provides a method for restoring fertility of a sterile wheat plant bearing the T. timopheevii CMS cytoplasm, comprising the step of transforming a parent sterile wheat plant bearing the T. timopheevii CMS cytoplasm, with a Rf1, Rf3, Rf4, Rf7 and/or Rf-rye nucleic acid as described above or genetically engineering said sterile plant to express a Rf1, Rf3, Rf4, Rf7 and/or Rf-rye nucleic acids.

### Use of the Nucleic Acids of the Present Disclosure for Identifying Rf1, Rf3, Rf4, Rf7 and Rf-Rye Restorer Alleles or Transgenic Elements

[0161] The present disclosure further provides methods of identifying the respective Rf1, Rf3, Rf4, Rf7 and/or Rf-rye restorer alleles and/or Rf1, Rf3, Rf4, Rf7 and/or Rf-rye nucleic acids as disclosed in the previous sections, and more generally methods of selecting or breeding wheat plants for the presence or absence of the Rf1, Rf3, Rf4, Rf7 and/or Rf-rye fertility restorer alleles and/or corresponding Rf1, Rf3, Rf4, Rf7 and/or Rf-rye nucleic acids.

[0162] Such methods of identifying, selecting or breeding wheat plants comprise obtaining one or more wheat plants and assessing their DNA to determine the presence or absence of the Rf1, Rf3, Rf4, Rf7 and/or Rf-rye fertility restorer alleles and/or corresponding Rf1, Rf3, Rf4, Rf7 and/or Rf-rye nucleic acids.

[0163] Such methods may be used, for example, to determine which progeny resulting from a cross have the required fertility restorer allele or Rf nucleic acids (or combination thereof) and accordingly to guide the preparation of plants having the required fertility restorer allele or Rf nucleic acids in combination with the presence or absence of other desirable traits.

[0164] The method will consist of identifying the presence of the Rf1, Rf3, Rf4, Rf7 and/or Rf-rye allele or nucleic acids in the fertile plant, said plant being either a fertile transgenic plant or a non-transgenic plant. Optionally, the method further consists of identifying the absence of the Rf1, Rf3, Rf4, Rf7 and/or Rf-rye allele or nucleic acids in non-restorer plants and/or sterile plants.

[0165] Accordingly, it is disclosed herein the means for specifically detecting the Rf1, Rf3, Rf4, Rf7 and/or Rf-rye nucleic acids in a wheat plant.

[0166] Such means include for example a pair of primers for the specific amplification of a fragment nucleotide sequence of Rf1, Rf3, Rf4, Rf7 and/or Rf-rye nucleic acids from plant wheat genomic DNA.

[0167] As used herein, a primer encompasses any nucleic acid that is capable of priming the synthesis of a nascent nucleic acid in a template-dependent process, such as PCR. Typically, primers are oligonucleotides from 10 to 30 nucleotides, but longer sequences can be employed. Primers may be provided in double-stranded form though single-stranded form is preferred.

[0168] Alternatively, nucleic acid probe can be used for the specific detection of any one of Rf1, Rf3, Rf4, Rf7 and/or Rf-rye nucleic acids.

[0169] As used herein, a nucleic acid probe encompass any nucleic acid of at least 30 nucleotides and which can specifically hybridizes under standard stringent conditions with a defined nucleic acid. Standard stringent conditions as used herein refers to conditions for hybridization described for example in Sambrook et al 1989 which can comprise 1) immobilizing plant genomic DNA fragments or library DNA on a filter 2) prehybridizing the filter for 1 to 2 hours at 65° C. in 6×SSC 5×Denhardt's reagent, 0.5% SDS and 20 mg/ml denatured carrier DNA 3) adding the probe (labeled) 4) incubating for 16 to 24 hours 5) washing the filter once for 30 min at 68° C. in 6×SSC, 0.1% SDS 6) washing the filter three times (two times for 30 min in 30 ml and once for 10 min in 500 ml) at 68° C. in 2×SSC 0.1% SDS. The nucleic acid probe may further comprise labeling agent, such as fluorescent agents covalently attached to the nucleic acid part of the probe.

### Methods of Producing a Wheat Plant Carrying a Modified Rf3 Restorer of Fertility

[0170] The inventors have also identified two types of Rf3 restorer of fertility, one with a strong fertility restoration, for example, capable of providing plants with a fertility score above 1.0, for example comprised between 1.0 and 2.0 and another with a weak fertility restoration, for example, capable of providing plants having a fertility score below 0.1, for example comprised between between 0.5 and 1.0.

[0171] Surprisingly, the strong fertility restoration correlates with the absence in the genome of the wheat plant carrying Rf3 of a 163 bp fragment of SEQ ID NO:3174, located in the 5′UTR of Rf3 coding sequence.

[0172] Accordingly, the disclosure relates to a method for producing a wheat plant carrying a Rf3 restorer of fertility, said method comprising (i) providing a parent wheat plant comprising in its genome at least a 163 bp fragment of SEQ ID NO:3174, and (ii) deleting a fragment of at least 10 bp of said fragment of SEQ ID NO:3174, for example at least 20 bp, 30 bp, 40 bp, 50 bp, 60 bp, 70 bp, 80 bp, 90 bp, 100 bp, 110 bp, 120 bp, 130 bp, 140 bp, 150 bp, 160 bp or the whole fragment of SEQ ID NO:3174 in the genome of said wheat plant, thereby obtaining said wheat plant carrying a Rf3 restorer of fertility.

[0173] Advantageously, the fertility score of the obtained wheat plant has a fertility score higher than the parent wheat plant, due to the deletion of said fragment depicted in SEQ ID NO:3174. The skilled person may select the deletion such as to obtain an increase in fertility restoration as compared to the parent wheat plant with the full fragment of SEQ ID NO:3174 in its genome.

[0174] In specific embodiments, the parent wheat plant has a fertility score below 1, for example comprised between 0.5 and 1.0 and the obtained wheat plant has a fertility score above 1.0, for example comprised between 1.0 and 2.0.

[0175] It is also possible to restore fertility from plants having rf3 non-restorer allele presenting a frameshift due to nucleotides deletion or insertion as compared to the Rf3 restorer allele RLF29a sequence of SEQ ID NO:3146 (see also Example 22).

[0176] Such deletion of genomic fragment or correction of frameshift may be obtained by any suitable methods known by the skilled person in the art, including genome editing tools such as, but not limited to, meganucleases, ZFNs, TALENs (WO2011072246) or CRISPR CAS system (including CRISPR Cas9, WO2013181440) or their next generations based on double-strand break technologies using engineered nucleases. Examples of such methods are also described in Example 15 and Example 22.

[0177] The wheat plants as obtained by the method described above are also part of the disclosure. Typically, such wheat plant as obtained by the above method, or obtainable by such method, carries a Rf3 restorer of fertility, wherein only a part but not the whole genomic fragment of SEQ ID NO:3174 is deleted in the genome of said wheat plant. Typically, a fragment between 10 bp and 162 bp of SEQ ID NO:3174 is deleted in the genome of said wheat plant. It is expected that the obtained wheat plant with the genome deletion has a fertility score higher than the fertility score as measured in a parent wheat plant with identical genome except for the full sequence of SEQ ID NO:3174 in its genome. Alternatively, such wheat plant as obtained by the above method, or obtainable by such method, carries a Rf3 restorer of fertility, wherein nucleotides of RFL29c has been deleted or added to restore inframe translation.

### Methods for Assessing Fertility Restoration in a Wheat Plant

[0178] The disclosure also includes a method for assessing fertility restoration in a wheat plant, said method comprising determining the presence or absence of a fragment of SEQ ID NO:3174 in the genome of said plant, wherein the presence of the whole fragment is indicative of a weak restoration of fertility and a deletion of at least a part of such fragment is indicative of a strong restoration of fertility. Typically said method is performed in a wheat plant which is susceptible to carry a Rf3 restorer of fertility.

[0179] It is also disclosed herein nucleic acid probes for use in the above methods for assessing fertility restoration in wheat plant, wherein said nucleic acid probe consists of a nucleic acid of at least 10 nucleotides within SEQ ID NO:3174.

[0180] Typically, said nucleic acid probe is a fragment of at least 20 bp, 30 bp, 40 bp, 50 bp, 60 bp, 70 bp, 80 bp, 90 bp, 100 bp, 110 bp, 120 bp, 130 bp, 140 bp, 150 bp, 160 bp or the whole fragment of SEQ ID NO:3174.

The Wheat Plant Restorer of Fertility of T. timopheevii CMS Cytoplasm with at Least Three Specific Fertility Restorer Alleles

[0181] The inventors have shown that a combination of at least 3 specific fertility restorer alleles within the restorer loci Rf1, Rf3, Rf4 and Rf7 enable the obtention of plants with full restoration of fertility of T. timopheevii CMS cytoplasm.

[0182] Therefore, a first aspect of the present disclosure relates to a wheat plant restorer of fertility of T. timopheevii CMS cytoplasm, wherein the plant comprises at least three fertility restorer alleles within the restorer loci chosen amongst Rf1, Rf3, Rf4 and Rf7.

[0183] In specific embodiments, the plant comprises at least the three fertility restorer alleles Rf1, Rf3, Rf4.

[0184] In specific embodiments, the plant comprises at least the three fertility restorer alleles Rf1, Rf4, Rf7.

[0185] In specific embodiments, the plant comprises at least the three fertility restorer alleles Rf1, Rf3, Rf7.

[0186] In specific embodiments, the plant comprises at least the three fertility restorer alleles Rf3, Rf4, Rf7.

[0187] As used herein, the Rf1 locus refers to the locus of the Rf1 restorer allele, which locus is located at most 10 cM, preferably at most 7 cM, more preferably at most 2 cM, from marker cfn0522096 of SEQ ID NO:4 and/or from marker cfn05277067 of SEQ ID NO:10. In a specific embodiment, the wheat plant restorer of fertility according to the present disclosure includes at least one Rf1 restorer allele, said Rf1 restorer allele being located within the chromosomal interval between SNP markers cfn0522096 of SEQ ID NO:3190 and cfn05277067 of SEQ ID NO:3196. In specific embodiments, the wheat plant restorer of fertility includes one Rf1 restorer allele at the Rf1 locus characterized by the presence of one or more of the SNP allele(s) as identified by Table 1.

TABLE 1
SNP markers for mapping of Rf1 locus

| | | Marker SEQ ID | |
|---|---|---|---|
| SNP# | Marker Name | NO: | Restorer Allele |
| SNP1 | cfn523072 | 3187 | T |
| SNP2 | cfn0523109 | 3188 | A |
| SNP3 | 276I13_96B22_97797 | 3189 | C |
| SNP4 | cfn0522096 | 3190 | C |
| SNP5 | cfn0527763 | 3191 | C |
| SNP6 | 104A4_105172 | 3192 | TG |
| SNP7 | 104A4_105588 | 3193 | A |
| SNP8 | cfn0373248 | 3194 | T |
| SNP9 | cfn1097828 | 3195 | C |
| SNP10 | cfn0527067 | 3196 | A |
| SNP11 | cfn0528390 | 3197 | G |
| SNP12 | BWS0267 | 3198 | A |
| SNP13 | cfn0527718 | 3199 | T |
| SNP14 | cfn0524469 | 3200 | G |
| SNP15 | cfn0524921 | 3201 | G |
| SNP16 | cfn1122326 | 3202 | C |

[0188] Preferably, the wheat plant restorer of fertility according to the present disclosure includes one Rf1 restorer allele at the Rf1 locus characterized by the presence of the SNP3 and/or SNP7 restorer alleles(s) as described in Table 1. More preferably, the wheat plant restorer of fertility is characterized by the haplotypes of the SNP3 and SNP7 restorer alleles “C” and “A”. In specific embodiments, the wheat plant restorer of fertility with Rf1 restorer allele comprises a Rf1 nucleic acid of the present disclosure as described above. Examples of Rf1 nucleic acids comprises the disclosed Rf1 nucleic acid sequences of SEQ ID NO:1913, SEQ ID NO:1914, SEQ ID NO:1915, SEQ ID NO:1916 or SEQ ID NO:3119, preferably a Rf1 nucleic acid comprises SEQ ID NO:3119.

[0189] As used herein, the Rf3 locus refers to the locus of the Rf3 restorer allele, which locus is at most 10 cM, preferably at most 7 cM, more preferably at most 2 cM, from marker cfn1249269 of SEQ ID NO:3205 and/or from marker BS00090770 of SEQ ID NO:3228. In a specific embodiment, the wheat plant restorer of fertility includes at least one Rf3 restorer allele within the Rf3 locus, said Rf3 restorer allele being located within the chromosomal fragment between SNP markers cfn1249269 and BS00090770. In specific embodiment, the wheat plant restorer of fertility includes one Rf3 restorer allele at the Rf3 locus characterized by the presence of one or more of the SNP alleles(s) as identified by Table 2.

TABLE 2
SNP Markers for mapping of Rf3 locus

| SNP# | Marker Name | Marker SEQ ID | Restorer Allele |
|---|---|---|---|
| SNP17 | cfn1252000 | 3203 | A |
| SNP18 | IWB14060* | 3204 | G |
| SNP19 | cfn1249269 | 3205 | G |
| SNP20 | 219K1_166464 | 3206 | T |
| SNP21 | 219K1_158251 | 3207 | G |
| SNP22 | 219K1_111446 | 3208 | A |
| SNP23 | 219K1_110042 | 3209 | T |
| SNP24 | 219K1_110005 | 3210 | C |
| SNP25 | 219K1_107461 | 3211 | A |
| SNP26 | 219K1_99688 | 3212 | T |
| SNP27 | 219K1_37 | 3213 | C |
| SNP28 | cfn1270524 | 3214 | T |
| SNP29 | 136H5_3M5_7601 | 3215 | T |
| SNP30 | cfn1288811 | 3216 | G |
| SNP31 | 136H5_3M5_89176 | 3217 | A |
| SNP32 | 136H5_3M5_89263 | 3218 | T |
| SNP33 | 136H5_3M5_138211 | 3219 | T |
| SNP34 | cfn0556874 | 3220 | C |
| SNP35 | 136H5_3M5_64154 | 3221 | C |
| SNP36 | 136H5_3M5_68807 | 3222 | G |
| SNP37 | 136H5_3M5_77916 | 3223 | A |
| SNP38 | cfn1246088 | 3224 | A |
| SNP39 | cfn1287194 | 3225 | G |
| SNP40 | cfn1258380 | 3226 | A |
| SNP41 | IWB72107* | 3227 | A |
| SNP42 | BS00090770 | 3228 | T |
| SNP43 | cfn1239345 | 3229 | A |

[0190] Preferably, the wheat plant restorer of fertility according to the present disclosure includes one Rf3 restorer allele at the Rf3 locus characterized by the presence of the SNP29 and/or SNP31 restorer alleles(s) as described in Table 2. More preferably, the wheat plant restorer of fertility is characterized by the haplotype of the SNP29 and SNP31 restorer alleles “T” and “A” respectively.

[0191] In another particular embodiment, that may be combined with the previous embodiments, the wheat plant restorer of fertility according to the present disclosure includes one Rf3 restorer allele at the Rf3 locus characterized by the presence of the SNP38 and SNP41 restorer alleles “A” and “A” respectively.

[0192] Preferably, the wheat plant restorer of fertility according to the present disclosure includes a Rf3 nucleic acid comprising SEQ ID NO:1712, SEQ ID NO:2230, SEQ ID NO:2238, SEQ ID NO:3146, SEQ ID NO:3147 or SEQ ID NO:3148, preferably SEQ ID NO:3146.

[0193] As used herein, the Rf7 locus is located at most 10 cM from marker cfn0919993 of SEQ ID NO:3231. In specific embodiment, the wheat plant restorer of fertility includes one Rf7 restorer allele at the Rf7 locus characterized by the presence of one or more of the SNP alleles(s) as identified by Table 3:

TABLE 3
SNP markers of Rf7 locus

| SNP# | Marker Name | Marker SEQ ID | Restorer Allele |
|---|---|---|---|
| SNP44 | cfn0917304 | 3230 | T |
| SNP45 | cfn0919993 | 3231 | G |
| SNP46 | cfn0920459 | 3232 | C |
| SNP49 | cfn0915987 | 3445 | G |
| SNP50 | cfn0920253 | 3446 | A |
| SNP51 | cfn0448874 | 3447 | T |
| SNP52 | cfn0923814 | 3448 | C |
| SNP53 | cfn0924180 | 3449 | G |
| SNP54 | cfn0919484 | 3450 | G |

[0194] Preferably, the wheat plant restorer of fertility according to the present disclosure includes one Rf7 restorer allele at the Rf7 locus characterized by the presence of the nine SNP restorer alleles SNP44-SNP46 and SNP49-54 of “restorer allele” haplotype, as described in Table 3.

[0195] As used herein, the Rf4 locus is located at most 10 cM from marker cfn0393953 of SEQ ID NO:3233. In specific embodiment, the wheat plant restorer of fertility includes one Rf4 restorer allele at the Rf4 locus characterized by the presence of one or more of the SNP alleles(s) as identified by Table 4.

TABLE 4
SNP markers of Rf4 locus

| SNP# | Marker Name | Marker SEQ ID | Restorer Allele |
|---|---|---|---|
| SNP47 | cfn0393953 | 3233 | C |
| SNP48 | cfn0856945 | 3234 | G |

[0196] Preferably, the wheat plant restorer of fertility according to the present disclosure includes one Rf4 restorer allele at the Rf4 locus characterized by the presence of the two SNP restorer alleles, SNP47, and SNP48, of the haplotype “C” and “G” respectively, as described in Table 4.

[0197] In specific embodiments, the wheat plant restorer of fertility with Rf4 restorer allele comprises a Rf4 nucleic acid of the present disclosure as described above. Examples of Rf4 nucleic acids comprises the disclosed Rf4 nucleic acid sequences of SEQ ID NO:2031, SEQ ID NO:3140 to 3142.

[0198] In a particular embodiment, the wheat plant restorer of fertility of T. timopheevii CMS cytoplasm comprises one Rf3 restorer allele and two other fertility restorer alleles selected amongst Rf1, Rf4 and Rf7 restorer alleles. Preferably, the wheat plant restorer of fertility of T. timopheevii CMS cytoplasm according to the present disclosure comprises the Rf1, Rf3, and Rf7 restorer alleles.

[0199] In particular, it is hereby included a wheat plant comprising Rf1, Rf3 and Rf7 restorer alleles as provided by the seed samples as deposited on 25 Sep. 2017 under deposit number NCIMB 42811, NCIMB 42812, NCIMB 42813, NCIMB 42814, NCIMB 42815, NCIMB 42816, and NCIMB 42817 at the NCIMB collection.

[0200] The disclosure also relates to hybrid wheat plants which can be produced by crossing a wheat plant restorer of fertility according to the present disclosure as described above with a second plant.

[0201] In certain embodiments, the wheat plant according to the disclosure is alloplasmic and comprises the T. timopheevii cytoplasm.

[0202] For example, a hybrid wheat plant may be obtained by crossing a wheat plant restorer of fertility according to the present disclosure as described above, preferably comprising Rf1, Rf3 and Rf7 restorer alleles, and a wheat plant which does not have said fertility restorer alleles.

[0203] It is also disclosed herein a method for producing a wheat hybrid plant comprising the steps of:
[0204] a. crossing a sterile female wheat plant comprising the T. timopheevii cytoplasm with a fertile male wheat plant of the present disclosure as described above;
[0205] b. collecting the hybrid seed;
[0206] c. optionally detecting the presence of T. timopheevii cytoplasm, and/or at least three of the Rf locus chosen amongst Rf1, Rf3, Rf4 and Rf7 in the hybrid seed;
[0207] d. optionally detecting hybridity level of the hybrid seed.

[0208] Therefore, it is also disclosed herein the wheat plants or lines according to the present disclosure developed to obtain such hybrid plants. Such plants or lines typically comprise the cytoplasmic elements necessary for the implementation of the corresponding hybrid system. Preferably, the plants or lines comprise the fertility restorer alleles Rf1, Rf3 and Rf7 and T. timopheevii cytoplasm. In specific embodiments, such plants or lines comprise a fertility restorer allele Rf1 comprising a Rf1 nucleic acid of the present disclosure as disclosed above.

[0209] Alternatively, the detection of the presence of T. timopheevii cytoplasm and of at least three of the Rf locus chosen amongst Rf1, Rf3, Rf4 and Rf7 (step “c” of the method described above) can be performed on the parent lines in order to check their genotype before to start the cross (step “a”).

[0210] The T-CMS cytoplasm can be detected either phenotypically wherein a plant bearing rf genes and a T-CMS cytoplasm will be sterile or by molecular means able to detect the orf256 gene as described in Rathburn and Hedgcoth, 1991 and Song and Hedgcoth, 1994.

### Method of Producing and Selecting a Wheat Plant of the Disclosure

[0211] The present disclosure also relates to the methods to produce the wheat plant with the fertility restorer alleles as described in the previous section.

[0212] In one embodiment, said method for producing the wheat plant includes the following step:
[0213] a. providing a first wheat plant comprising one or two restorer allele selected among Rf1, Rf3 and Rf7 restorer alleles,
[0214] b. crossing said first wheat plant with a second wheat plant comprising one or two restorer alleles selected among Rf1, Rf3 and Rf7 restorer alleles, wherein Rf1, Rf3 and Rf7 restorer alleles are represented at least once in the panel of restorer alleles provided by the first plant and the second plant,
[0215] c. collecting the F1 hybrid seed,
[0216] d. obtaining homozygous plants from the F1 plants,
[0217] e. optionally detecting the presence of the Rf1, Rf3 and Rf7 restorer alleles in the hybrid seed and/or at each generation.

[0218] Preferentially, the female plant in step b) is bearing the T-CMS cytoplasm. In this case, the presence of the restorer alleles is assessed at every generation from step b) to step d) by using the markers and optionally by further by assessing the fertility level.

[0219] Method to generate homozygous plants are generally well known from skilled person of the art. This could be either by repetitive backcross or by double haploid development or by Single Seeds Descent (SSD) methods.

[0220] The applicant has deposited a sample of seeds of the disclosed wheat plant with said Rf1, Rf3 and Rf7 restorer alleles, on 25 Sep. 2017 under the Budapest treaty, at NCIMB collection under the number NCIMB 42811, NCIMB 42812, NCIMB 42813, NCIMB 42814, NCIMB 42815, NCIMB 42816, and NCIMB 42817.

[0221] The present disclosure further includes and provides methods of identifying the respective Rf1, Rf3, Rf4 and/or Rf7 restorer alleles as disclosed in the previous sections, and more generally methods of selecting or breeding wheat plants for the presence or absence of the Rf1, Rf3, Rf4 and/or Rf7 fertility restorer alleles. Such methods of identifying, selecting or breeding wheat plants comprise obtaining one or more wheat plants and assessing their DNA to determine the presence or absence of the Rf1, Rf3, Rf4 and/or Rf7 fertility restorer alleles contained in the respective locus.

[0222] Such methods may be used, for example, to determine which progeny resulting from a cross have the required combination of fertility restorer alleles and accordingly to guide the preparation of plants having the required combination in combination with the presence or absence of other desirable traits.

[0223] Accordingly, plants can be identified or selected by assessing them for the presence of one or more individual SNPs appearing in the above Tables 1, 2, 3 and 4, as well as the SNPs in Table 19, for assessing the presence of restorer alleles Rf1, Rf3, Rf7 or Rf4 respectively.

[0224] More generally, it is disclosed herein the specific means for detecting the restorer alleles in a wheat plant, more specifically Rf1, Rf3, Rf4 and Rf7 restorer alleles and their combinations.

[0225] Said means thus include any means suitable for detecting the following SNP markers within one or more of the following markers: SEQ ID NOs 3187-3235.

[0226] Any method known in the art may be used in the art to assess the presence or absence of a SNP. Some suitable methods include, but are not limited to, sequencing, hybridization assays, polymerase chain reaction (PCR), ligase chain reaction (LCR), and genotyping-by-sequence (GBS), or combinations thereof.

[0227] Different PCR based methods are available to the person skilled of the art. One can use the RT-PCR method or the Kaspar method from KBioscience (LGC Group, Teddington, Middlesex, UK).

[0228] The KASP™ genotyping system uses three target specific primers: two primers, each of them being specific of each allelic form of the SNP (Single Nucleotide Polymorphism) and one other primer to achieve reverse amplification, which is shared by both allelic form. Each target specific primer also presents a tail sequence that corresponds with one of two FRET probes: one label with FAM® dye and the other with HEX® dye.

[0229] Successive PCR reactions are performed. The nature of the emitted fluorescence is used to identify the allelic form or forms present in the mix from the studied DNA.

[0230] The primers identified in Table 5 are particularly suitable for use with the KASP™ genotyping system. Of course, the skilled person may use variant primers or nucleic acid probes of the primers as identified in Table 5, said variant primers or nucleic acid probes having at least 90%, and preferably 95% sequence identity with any one of the primers as identified in Table 5, or with the DNA genomic fragment amplified by the corresponding set of primers as identified in Table 5.

[0231] Percentage of sequence identity as used herein is determined by calculating the number of matched positions in aligned nucleic acid sequences, dividing the number of matched positions by the total number of aligned nucleotides, and multiplying by 100. A matched position refers to a position in which identical nucleotides occur at the same position in aligned nucleic acid sequences. For example, nucleic acid sequences may be aligned using the BLAST 2 sequences (Bl2seq) using BLASTN algorithms (www.ncbi.nlm.nih.gov).

[0232] As used herein, a primer encompasses any nucleic acid that is capable of priming the synthesis of a nascent nucleic acid in a template-dependent process, such as PCR. Typically, primers are oligonucleotides from 10 to 30 nucleotides, but longer sequences can be employed. Primers may be provided in double-stranded form though single-stranded form is preferred. Alternatively, nucleic acid probe can be used. Nucleic acid probe encompass any nucleic acid of at least 30 nucleotides and which can specifically hybridizes under standard stringent conditions with a defined nucleic acid. Standard stringent conditions as used herein refers to conditions for hybridization described for example in Sambrook et al 1989 which can comprise 1) immobilizing plant genomic DNA fragments or library DNA on a filter 2) prehybridizing the filter for 1 to 2 hours at 65° C. in 6×SSC 5×Denhardt's reagent, 0.5% SDS and 20 mg/mi denatured carrier DNA 3) adding the probe (labeled) 4) incubating for 16 to 24 hours 5) washing the filter once for 30 min at 68° C. in 6×SSC, 0.1% SDS 6) washing the filter three times (two times for 30 min in 30 ml and once for 10 min in 500 ml) at 68° C. in 2×SSC 0.1% SDS.

[0233] In specific embodiments, said primers for detecting the SNP markers of the present disclosure (specific for each allele “X” or “Y” or common) are as listed in the following table 5:

TABLE 5
Primers for use in detecting fertility restorer SNP
markers of the invention (as indicated in the primer name)

| SEQ | | |
|---|---|---|
| ID | | |
| NO | ID | Sequence |
| 3253 | cfn0238384 AlleleX | GAAGGTGACCAAGTTCATGCTGTAAAAAGATGTCT |
| | | GTGTGTCTAGC |
| 3254 | cfn0523109 AlleleX | GAAGGTGACCAAGTTCATGCTGGTGAACAAAACA |
| | | GGCCTACAATCA |
| 3255 | cfn0560679 AlleleX | GAAGGTGACCAAGTTCATGCTAATGATGTTTAACA |
| | | TTGGAACGGTCC |
| 3256 | cfn0917304 AlleleX | GAAGGTGACCAAGTTCATGCTGTGGTGGCGCTCT |
| | | ACCCG |
| 3257 | cfn0919993 AlleleX | GAAGGTGACCAAGTTCATGCTAAGTCATCGACTTA |
| | | CATGCTTCTTTG |
| 3258 | cfn0920459 AlleleX | GAAGGTGACCAAGTTCATGCTAGCCAAGGAAGCC |
| | | CAGATTTTC |
| 3259 | cfn1087371 AlleleX | GAAGGTGACCAAGTTCATGCTAGGGGAACTTTGG |
| | | GTATACACCA |
| 3260 | cfn1252000 AlleleX | GAAGGTGACCAAGTTCATGCTGTTAATGCTGTAG |
| | | CCATTCTTGCAA |
| 3261 | BWS0267 AlleleX | GAAGGTGACCAAGTTCATGCTTCAGCTGCATAAA |
| | | AAMCAGAATACCA |
| 3262 | cfn0524469 AlleleX | GAAGGTGACCAAGTTCATGCTGCACGTAGTAAGT |
| | | ATTGATTTTTCTGTG |
| 3263 | cfn0527067 AlleleX | GAAGGTGACCAAGTTCATGCTCAAATTACTTTTGT |
| | | TCTTTTATTTTTTTCGAAT |
| 3264 | cfn0527718 AlleleX | GAAGGTGACCAAGTTCATGCTAATTGTTCACAACA |
| | | TGGACATGAGAAC |
| 3265 | cfn1082074 AlleleX | GAAGGTGACCAAGTTCATGCTTACTGATAAAATCC |
| | | GGTTCAAATATATAAC |
| 3266 | cfn1239345 AlleleX | GAAGGTGACCAAGTTCATGCTGGCTTCTTTTTTCT |
| | | CCCTATAATATGGA |
| 3267 | cfn0554333 AlleleX | GAAGGTGACCAAGTTCATGCTGAGAGGCATCACA |
| | | TAGGCATAG |
| 3268 | cfn0436720 AlleleX | GAAGGTGACCAAGTTCATGCTATTCTTCATTCCTT |
| | | ACAACAAATATACCAAATT |
| 3269 | cfn0522096 AlleleX | GAAGGTGACCAAGTTCATGCTAGTAGAATACCAC |
| | | CCAATAAATCACTG |
| 3270 | cfn0523072 AlleleX | GAAGGTGACCAAGTTCATGCTCTAGCGCATGAGG |
| | | TCTATCG |
| 3271 | cfn0523990 AlleleX | GAAGGTGACCAAGTTCATGCTACATGAAGAGTGC |
| | | AGGCACACG |
| 3272 | cfn0524921 AlleleX | GAAGGTGACCAAGTTCATGCTATTGTTTCCATGTT |
| | | AAGCTTATATTGTGCA |
| 3273 | cfn0528390 AlleleX | GAAGGTGACCAAGTTCATGCTAAAAACATCTATTC |
| | | CAAGCAAGTATTAGTAAT |
| 3274 | cfn0530841 AlleleX | GAAGGTGACCAAGTTCATGCTTCTTGTTTATATAT |
| | | TCTCTTATCAGAAGTC |
| 3275 | cfn1122326 AlleleX | GAAGGTGACCAAGTTCATGCTGAATCTGATTAAGA |
| | | CGCTGGAGAAC |
| 3276 | cfn1249269 AlleleX | GAAGGTGACCAAGTTCATGCTGATTCAAAGAGGT |
| | | GACAAATATGTGTACT |
| 3277 | contig46312_253_ | |
| | BS00090770 | GAAGGTGACCAAGTTCATGCTGGTCGTAGCACAT |
| | AlleleX | AGCCGTTTAC |
| 3278 | 219K1_110042 | GAAGGTGACCAAGTTCATGCTACGGAATCGAGTC |
| | AlleleX | AACCAATTCCT |
| 3279 | cfn0373248 AlleleX | GAAGGTGACCAAGTTCATGCTAACAACAATTAYGA |
| | | GGATCAAATGGTCA |
| 3280 | cfn0527763 AlleleX | GAAGGTGACCAAGTTCATGCTATCTAGCCACGCA |
| | | AATGCCCGT |
| 3281 | cfn0556874 AlleleX | GAAGGTGACCAAGTTCATGCTAAAGAGCATGTCA |
| | | GACACAATGCAG |
| 3282 | cfn1097828 AlleleX | GAAGGTGACCAAGTTCATGCTGGTTCCTGAGAGA |
| | | GCAACCA |
| 3283 | cfn1246088 AlleleX | GAAGGTGACCAAGTTCATGCTGACATCTGATGAG |
| | | CCAGCATACA |
| 3284 | cfn1258380 AlleleX | GAAGGTGACCAAGTTCATGCTATCTACTCATCTAT |
| | | TGCAGATGCTCTT |
| 3285 | cfn1270524 AlleleX | GAAGGTGACCAAGTTCATGCTAAATGCCTAGTCTA |
| | | TACCTGATAAACTAAA |
| 3286 | cfn1287194 AlleleX | GAAGGTGACCAAGTTCATGCTACCTCCTCCGTAT |
| | | CTGATGGC |
| 3287 | cfn1288811 AlleleX | GAAGGTGACCAAGTTCATGCTTAATTTGGTTAACC |
| | | AAATCCTTTTTGATTTTT |
| 3288 | cfn1291249 AlleleX | GAAGGTGACCAAGTTCATGCTTCCCAGATTTAGC |
| | | ATGTGCATT |
| 3289 | cfn0231871 AlleleX | GAAGGTGACCAAGTTCATGCTACTGTATTAAATTA |
| | | GCTAGTGTGGCG |
| 3290 | cfn0393953 AlleleX | GAAGGTGACCAAGTTCATGCTAAAAACAAGTTGTC |
| | | ACCCAGATGAATC |
| 3291 | cfn0867742 AlleleX | GAAGGTGACCAAGTTCATGCTGCATCCTCGACAA |
| | | TGATTTCATCG |
| 3292 | cfn3126082 AlleleX | GAAGGTGACCAAGTTCATGCTAGATTTTAGCACCT |
| | | AACGCCGCAAA |
| 3293 | 104A4_105172 | GAAGGTGACCAAGTTCATGCTGTCGMACCCAATG |
| | AlleleX | AATAATGTTT |
| 3294 | 104A4_105588 | GAAGGTGACCAAGTTCATGCTGTTCCTTGTGACAT |
| | AlleleX | GTACTCATAA |
| 3295 | 136H5_3M5_138211 | GAAGGTGACCAAGTTCATGCTACTGGGTGCAAAG |
| | AlleleX | CCAAGATGATT |
| 3296 | 136H5_3M5_64154 | GAAGGTGACCAAGTTCATGCTGGCGAAACTTCGC |
| | AlleleX | CGCGATAAAT |
| 3297 | 136H5_3M5_68807 | GAAGGTGACCAAGTTCATGCTCAAGTTGCTCTTAA |
| | AlleleX | TTATCTGTGCGTA |
| 3298 | 136H5_3M5_7601 | GAAGGTGACCAAGTTCATGCTCGTCCCCCATGGC |
| | AlleleX | ACCTGT |
| 3299 | 136H5_3M5_77916 | GAAGGTGACCAAGTTCATGCTATAGCAAGTAGAG |
| | AlleleX | TTAACTTATCAAGTTATTA |
| 3300 | 136H5_3M5_89176 | GAAGGTGACCAAGTTCATGCTGGATTTTCTCACC |
| | AlleleX | GGCATCTCCA |
| 3301 | 136H5_3M5_89263 | GAAGGTGACCAAGTTCATGCTTCCCATGTTCTTTT |
| | AlleleX | TTTGCTCAAAAC |
| 3302 | 219K1_107461 | GAAGGTGACCAAGTTCATGCTATATTGTTTGTATT |
| | AlleleX | AAAAAGTTGTGTGTTTTGA |
| 3303 | 219K1_110005 | GAAGGTGACCAAGTTCATGCTGCCTTTTCTTCTTC |
| | AlleleX | CAGCATCTAC |
| 3304 | 219K1_111446 | GAAGGTGACCAAGTTCATGCTAGAATCGTTCTTC |
| | AlleleX | GAGAAGCACTCA |
| 3305 | 219K1_158251 | GAAGGTGACCAAGTTCATGCTCCTGGAGATGGAT |
| | AlleleX | CCGGTCAG |
| 3306 | 219K1_166464 | GAAGGTGACCAAGTTCATGCTCCTGAGCTGGGCT |
| | AlleleX | GCACC |
| 3307 | 219K1_37 | GAAGGTGACCAAGTTCATGCTAAAGGGCTATCCT |
| | | GGTGAACAAC |
| 3308 | 219K1_99688 | GAAGGTGACCAAGTTCATGCTGTTGCCCTGCGCA |
| | AlleleX | AAATCAAACTT |
| 3309 | 276113_96B22_97797 | GAAGGTGACCAAGTTCATGCTGTACTATGGCTAT |
| | AlleleX | GTCTCTGAATGC |
| 3310 | CAP7_c3847_204 | GAAGGTGACCAAGTTCATGCTCATTCGACGCGTC |
| | AlleleX | TTCCGCAATA |
| 3311 | Tdurum_contig50667_ | GAAGGTGACCAAGTTCATGCTGATGACATGGAGG |
| | 306 AlleleX | ATTATATCGACGA |
| 3312 | cfn0856945 AlleleX | GAAGGTGACCAAGTTCATGCTGCACATGCTTTATT |
| | | ACTGATCTGATTTG |
| 3313 | S100067637 | GAAGGTGACCAAGTTCATGCTCCAAATGTCCGAA |
| | AlleleX | TTCAGAGCAG |
| 3404 | S100069923 | GAAGGTGACCAAGTTCATGCTACATATACGCGAG |
| | AlleleX | CGCTCCTG |
| 3315 | S3045171 AlleleX | GAAGGTGACCAAGTTCATGCTGGTTCTTGGCACA |
| | | CTCCCCAG |
| 3316 | S3045222 AlleleX | GAAGGTGACCAAGTTCATGCTAACCTAAGTAGTAA |
| | | GCTTGCTGGGT |
| 3317 | cfn0238384 Allele | GAAGGTCGGAGTCAACGGATTGTAAAAAGATGTC |
| | Y | TGTGTGTCTAGG |
| 3318 | cfn0523109 Allele | GAAGGTCGGAGTCAACGGATTGTGAACAAAACAG |
| | Y | GCCTACAATCC |
| 3319 | cfn0560679 Allele | GAAGGTCGGAGTCAACGGATTCAATGATGTTTAA |
| | Y | CATTGGAACGGTCT |
| 3320 | cfn0917304 Allele | GAAGGTCGGAGTCAACGGATTGGTGGTGGCGCT |
| | Y | CTACCCT |
| 3321 | cfn0919993 Allele | GAAGGTCGGAGTCAACGGATTCAAGTCATCGACT |
| | Y | TACATGCTTCTTTT |
| 3322 | cfn0920459 Allele | GAAGGTCGGAGTCAACGGATTAGCCAAGGAAGC |
| | Y | CCAGATTTTG |
| 3323 | cfn1087371 Allele | GAAGGTCGGAGTCAACGGATTGGGGAACTTTGG |
| | Y | GTATACACCG |
| 3324 | cfn1252000 Allele | GAAGGTCGGAGTCAACGGATTGTTAATGCTGTAG |
| | Y | CCATTCTTGCAG |
| 3325 | BWS0267 Allele Y | GAAGGTCGGAGTCAACGGATTCAGCTGCATAAAA |
| | | AMCAGAATACCG |
| 3326 | cfn0524469 Allele | GAAGGTCGGAGTCAACGGATTGCACGTAGTAAGT |
| | Y | ATTGATTTTTCTGTT |
| 3327 | cfn0527067 Allele | GAAGGTCGGAGTCAACGGATTCAAATTACTTTTGT |
| | Y | TCTTTTATTTTTTTCGAAC |
| 3328 | cfn0527718 Allele | GAAGGTCGGAGTCAACGGATTATAAATTGTTCACA |
| | Y | ACATGGACATGAGAAT |
| 3329 | cfn1082074 Allele | GAAGGTCGGAGTCAACGGATTCTTACTGATAAAAT |
| | Y | CCGGTTCAAATATATAAT |
| 3330 | cfn1239345 Allele | GAAGGTCGGAGTCAACGGATTGCTTCTTTTTTCTC |
| | Y | CCTATAATATGGG |
| 3331 | cfn0554333 Allele | GAAGGTCGGAGTCAACGGATTGAGAGGCATCACA |
| | Y | TAGGCATAC |
| 3332 | cfn0436720 Allele | GAAGGTCGGAGTCAACGGATTCTTCATTCCTTACA |
| | Y | ACAAATATACCAAATC |
| 3333 | cfn0522096 Allele | GAAGGTCGGAGTCAACGGATTAGTAGAATACCAC |
| | Y | CCAATAAATCACTC |
| 3334 | cfn0523072 Allele | GAAGGTCGGAGTCAACGGATTAACTCTAGCGCAT |
| | Y | GAGGTCTATCA |
| 3335 | cfn0523990 Allele | GAAGGTCGGAGTCAACGGATTATACATGAAGAGT |
| | Y | GCAGGCACACT |
| 3336 | cfn0524921 Allele | GAAGGTCGGAGTCAACGGATTGTTTCCATGTTAA |
| | Y | GCTTATATTGTGCG |
| 3337 | cfn0528390 Allele | GAAGGTCGGAGTCAACGGATTAAACATCTATTCC |
| | Y | AAGCAAGTATTAGTAAC |
| 3338 | cfn0530841 Allele | GAAGGTCGGAGTCAACGGATTCTTCTTGTTTATAT |
| | Y | ATTCTCTTATCAGAAGTT |
| 3339 | cfn1122326 Allele | GAAGGTCGGAGTCAACGGATTGGAATCTGATTAA |
| | Y | GACGCTGGAGAAT |
| 3340 | cfn1249269 Allele | GAAGGTCGGAGTCAACGGATTCAAAGAGGTGACA |
| | Y | AATATGTGTACC |
| 3341 | contig46312 Allele | GAAGGTCGGAGTCAACGGATTAGGTCGTAGCACA |
| | Y_253_BS00090770 | TAGCCGTTTAT |
| 3342 | 219K1_110042 | GAAGGTCGGAGTCAACGGATTCGGAATCGAGTCA |
| | Allele Y | ACCAATTCCC |
| 3343 | cfn0373248 Allele | GAAGGTCGGAGTCAACGGATTAACAACAATTAYG |
| | Y | AGGATCAAATGGTCT |
| 3344 | cfn0527763 Allele | GAAGGTCGGAGTCAACGGATTCTAGCCACGCAAA |
| | Y | TGCCCGC |
| 3345 | cfn0556874 Allele | GAAGGTCGGAGTCAACGGATTGAAAGAGCATGTC |
| | Y | AGACACAATGCAA |
| 3346 | cfn1097828 Allele | GAAGGTCGGAGTCAACGGATTGGTTCCTGAGAGA |
| | Y | GCAACCG |
| 3347 | cfn1246088 Allele | GAAGGTCGGAGTCAACGGATTGACATCTGATGAG |
| | Y | CCAGCATACC |
| 3348 | cfn1258380 Allele | GAAGGTCGGAGTCAACGGATTCTACTCATCTATT |
| | Y | GCAGATGCTCTG |
| 3349 | cfn1270524 Allele | GAAGGTCGGAGTCAACGGATTAAATGCCTAGTCT |
| | Y | ATACCTGATAAACTAAT |
| 3350 | cfn1287194 Allele | GAAGGTCGGAGTCAACGGATTCACCTCCTCCGTA |
| | Y | TCTGATGGT |
| 3351 | cfn1288811 Allele | GAAGGTCGGAGTCAACGGATTAATTTGGTTAACC |
| | Y | AAATCCTTTTTGATTTTG |
| 3352 | cfn1291249 Allele | GAAGGTCGGAGTCAACGGATTCTTCCCAGATTTA |
| | Y | GCATGTGCATG |
| 3353 | cfn0231871 Allele | GAAGGTCGGAGTCAACGGATTCTACTGTATTAAAT |
| | Y | TAGCTAGTGTGGCT |
| 3354 | cfn0393953 Allele | GAAGGTCGGAGTCAACGGATTAAAAAAACAAGTT |
| | Y | GTCACCCAGATGAATT |
| 3355 | cfn0867742 Allele | GAAGGTCGGAGTCAACGGATTGGCATCCTCGACA |
| | Y | ATGATTTCATCT |
| 3356 | cfn3126082 Allele | GAAGGTCGGAGTCAACGGATTTTAGCACCTAACG |
| | Y | CCGCAAC |
| 3357 | 104A4_105172 | GAAGGTCGGAGTCAACGGATTCTGTCGMACCCAA |
| | Allele Y | TGAATAATGTTC |
| 3358 | 104A4_105588 | GAAGGTCGGAGTCAACGGATTGTTCCTTGTGACA |
| | Allele Y | TGTACTCATAC |
| 3359 | 136H5_3M5_1382 | GAAGGTCGGAGTCAACGGATTACTGGGTGCAAAG |
| | 11 Allele Y | CCAAGATGATA |
| 3360 | 136H5_3M5_64154 | GAAGGTCGGAGTCAACGGATTGCGAAACTTCGCC |
| | Allele Y | GCGATAAAC |
| 3361 | 136H5_3M5_68807 | GAAGGTCGGAGTCAACGGATTAAGTTGCTCTTAA |
| | Allele Y | TTATCTGTGCGTG |
| 3362 | 136H5_3M5_7601 | GAAGGTCGGAGTCAACGGATTGTCCCCCATGGCA |
| | Allele Y | CCTGC |
| 3363 | 136H5_3M5_77916 | GAAGGTCGGAGTCAACGGATTAGCAAGTAGAGTT |
| | Allele Y | AACTTATCAAGTTATTG |
| 3364 | 136H5_3M5_89176 | GAAGGTCGGAGTCAACGGATTTTCTCACCGGCAT |
| | Allele Y | CTCCG |
| 3365 | 136H5_3M5_89263 | GAAGGTCGGAGTCAACGGATTCTTCCCATGTTCT |
| | Allele Y | TTTTTTGCTCAAAAT |
| 3366 | 219K1_107461 | GAAGGTCGGAGTCAACGGATTATATTGTTTGTATT |
| | Allele Y | AAAAAGTTGTGTGTTTTGC |
| 3367 | 219K1_110005 | GAAGGTCGGAGTCAACGGATTCGCCTTTTCTTCTT |
| | Allele Y | CCAGCATCTAT |
| 3368 | 219K1_111446 | GAAGGTCGGAGTCAACGGATTAATCGTTCTTCGA |
| | Allele Y | GAAGCACTCC |
| 3369 | 219K1_158251 | GAAGGTCGGAGTCAACGGATTCCTGGAGATGGAT |
| | Allele Y | CCGGTCAA |
| 3370 | 219K1_166464 | GAAGGTCGGAGTCAACGGATTGCCTGAGCTGGG |
| | Allele Y | CTGCACT |
| 3371 | 219K1_37 Allele Y | GAAGGTCGGAGTCAACGGATTACAAAGGGCTATC |
| | | CTGGTGAACAAT |
| 3372 | 219K1_99688 | GAAGGTCGGAGTCAACGGATTGCCCTGCGCAAAA |
| | Allele Y | TCAAACTC |
| 3373 | 276I13_96B22_97797 | GAAGGTCGGAGTCAACGGATTAAGTACTATGGCT |
| | Allele Y | ATGTCTCTGAATGT |
| 3374 | CAP7_c3847_204 | GAAGGTCGGAGTCAACGGATTCGACGCGTCTTCC |
| | Allele Y | GCAATG |
| 3375 | Tdurum_contig50667_ | GAAGGTCGGAGTCAACGGATTATGACATGGAGGA |
| | 306 Allele Y | TTATATCGACGG |
| 3376 | cfn0856945 Allele | GAAGGTCGGAGTCAACGGATTGGCACATGCTTTA |
| | Y | TTACTGATCTGATTTT |
| 3377 | S100067637 Allele | GAAGGTCGGAGTCAACGGATTCCAAATGTCCGAA |
| | Y | TTCAGAGCAC |
| 3378 | S100069923 Allele | GAAGGTCGGAGTCAACGGATTGTACATATACGCG |
| | Y | AGCGCTCCTA |
| 3379 | S3045171 Allele Y | GAAGGTCGGAGTCAACGGATTGGTTCTTGGCACA |
| | | CTCCCCAA |
| 3380 | S3045222 Allele Y | GAAGGTCGGAGTCAACGGATTCCTAAGTAGTAAG |
| | | CTTGCTGGGC |
| 3381 | cfn0238384 | AGGGGGGCGTACGGGGTGA |
| | Common | |
| 3382 | cfn0523109 | GTGTGTGCTAATGTGGATATACGTAAGTT |
| | Common | |
| 3383 | cfn0560679 | GACGTTGAAGGGGGCATAGATCAAA |
| | Common | |
| 3384 | cfn0917304 | CAACTGCTTGGAGAAAGGCAACACAA |
| | Common | |
| 3385 | cfn0919993 | CCATTAACAAGTACTGCATAGGTGCATAT |
| | Common | |
| 3386 | cfn0920459 | CCTCCTCCTAATTAAGCTCCTATAGATA |
| | Common | |
| 3387 | cfn1087371 | CCCCCTTCTTCTTTCACTAGGGTAA |
| | Common | |
| 3388 | cfn1252000 | GTGCCCATAAGACGACTGGGACAA |
| | Common | |
| 3389 | BWS0267 | CTGCGTTAAGGTTCAGGCAACTGAT |
| | Common | |
| 3390 | cfn0524469 | GCCAATTTTCAAATCTAAGTCCACAGAGA |
| | Common | |
| 3391 | cfn0527067 | ATATGATTCACCCTAGATCCTTCACCTTA |
| | Common | |
| 3392 | cfn0527718 | GTTTCCTCCAATGTTCTTCCC |
| | Common | |
| 3393 | cfn1082074 | TGTCTCGCCTCGCTCTGGTTAATTT |
| | Common | |
| 3394 | cfn1239345 | ACCCTCGCTGCAGTTCCTTCTTAAA |
| | Common | |
| 3395 | cfn0554333 | AAATTCACACCATCATTGATCTGGGGTAT |
| | Common | |
| 3396 | cfn0436720 | GTCCACTGAGAATTAAGGATGCATTCTTT |
| | Common | |
| 3397 | cfn0522096 | AAGTAGTACTCGTAGAGAGTTAACACAGA |
| | Common | |
| 3398 | cfn0523072 | GCTTGACAATGATAATGCCCCCGAA |
| | Common | |
| 3399 | cfn0523990 | AATAACTCTTGTACTTCAGGATGAACGTTT |
| | Common | |
| 3400 | cfn0524921 | GCCCTTTGGTAATTCCATTTCAATCTTTT |
| | Common | |
| 3401 | cfn0528390 | GATGAGGAAGGTCTTCATGTTGGGTT |
| | Common | |
| 3402 | cfn0530841 | GAGCAGCACATCGTTAGCTGTTCTA |
| | Common | |
| 3403 | cfn1122326 | CAGATGGCCTAGTCGTGACATATCTT |
| | Common | |
| 3404 | cfn1249269 | TAAAAGAACACAAATGTGGCCCTAGTGAT |
| | Common | |
| 3405 | contig46312_ | GAAACATTCCTTCGGACAACTATGCATTA |
| | 253_BS00090770 | |
| | Common | |
| 3406 | 219K1_110042 | GCATCTTCAAGGGAGCCACTCAAAA |
| | Common | |
| 3407 | cfn0373248 | ATCATTGCCACGRAAAAAATCTCACAAGAT |
| | Common | |
| 3408 | cfn0527763 | CCTTGTCCACCGAGACATGTACAAA |
| | Common | |
| 3409 | cfn0556874 | CCTGCTGGAAATGGGATTTCTTGTTTATT |
| | Common | |
| 3410 | cfn1097828 | GCTTCCTCTCGGTAGCGATGGAT |
| | Common | |
| 3411 | cfn1246088 | GGGACGTGGAATTTGGAAAGACACAT |
| | Common | |
| 3412 | cfn1258380 | TATAGGAGTGATAGCACCACACAATTCAT |
| | Common | |
| 3413 | cfn1270524 | TGTACCGAAACTCAACCAAATGACCATTT |
| | Common | |
| 3414 | cfn1287194 | CAGAAGGCACTGGGAGGGGATT |
| | Common | |
| 3415 | cfn1288811 | GCACAATGTTTGACATTCGGTTTTCTAGTT |
| | Common | |
| 3416 | cfn1291249 | CTGACTGTCGTATCTTCAACATACTGATT |
| | Common | |
| 3417 | cfn0231871 | CCAAGGTATATGTGCCATTATCCTCAAA |
| | Common | |
| 3418 | cfn0393953 | CACTCACCGTCGACATTGACATAGTT |
| | Common | |
| 3419 | cfn0867742 | AGCCTCCGCGTCGTGATGGAAT |
| | Common | |
| 3420 | cfn3126082 | AAAGGGACAGCGATTTGATCTGG |
| | Common | |
| 3421 | 104A4_105172 | GCCATCCTCTCGGAGCCAGAA |
| | Common | |
| 3422 | 104A4_105588 | CAAGGATGGGGAGTATATGGCTCTT |
| | Common | |
| 3423 | 136H5_3M5_138211 | CCTCCCAACGGCCATCAATCAATTT |
| | Common | |
| 3424 | 136H5_3M5_64154 | GATCATCGGGGAACCTGATGATAGTT |
| | Common | |
| | Common | |
| 3425 | 136H5_3M5_68807 | TTGGTTGGTTACGTCAGGTTAAGACTTA |
| | Common | |
| 3426 | 136H5_3M5_7601 | CTTCTCTGTGGCCGAAAACCTCTT |
| | Common | |
| 3427 | 136H5_3M5_77916 | GCTKTAGACTCTAAGTACCACAGAAGAA |
| | Common | |
| 3428 | 136H5_3M5_89176 | CCTACCATCCTTAAATACTCTTGCTCAAA |
| | Common | |
| 3429 | 136H5_3M5_89263 | AAGCAACTAGAAAAATATTTGGACTAGCAT |
| | Common | |
| 3430 | 219K1_107461 | GTTGATGCGAATTTGAAAATGACATAATAA |
| | Common | |
| 3431 | 219K1_110005 | TTGACTCGATTCCGTGTGAGGCTAA |
| | Common | |
| 3432 | 219K1_111446 | AATATGATACAGACCCAAGACAAACCATTT |
| | Common | |
| 3433 | 219K1_158251 | TCCTCACAAATCACGGGCCCCT |
| | Common | |
| 3434 | 219K1_166464 | GACCGTGGTATATGCCACCACGTT |
| | Common | |
| 3435 | 219K1_37 | GGCTTCATTATCAAATTCTGACCCATCTT |
| | Common | |
| 3436 | 219K1_99688 | GGGCGGGACCTGACTTGATGAT |
| | Common | |
| 3437 | 276I13_96B22_97797 | ACGACAATATAGACAAATAAAACCAAACAA |
| | Common | |
| 3438 | CAP7_c3847_204 | CCGCGGCCGAAGCAGGCAA |
| | Common | |
| 3439 | Tdurum_contig50667_ | ATACATGTCGGCGTCCCAGTCC |
| | 306 Common | |
| 3440 | cfn0856945 | GGTGTAGGCAAACCTAAAATAAACAGTCAA |
| | Common | |
| 3441 | S100067637 | CAACGCCAAACGCCAACGCCAT |
| | Common | |
| 3442 | S100069923 | GCCTTGTACTGCAGTGAAGTGTGAT |
| | Common | |
| 3443 | S3045171 | TGACGGCTGCGAGGACGAGAAT |
| | Common | |
| 3444 | S3045222 | AGTCCAGAGTTACAGGACATGGCTA |
| | Common | |

### Use of the Wheat Plants of the Disclosure

[0234] The plant according to the disclosure can be crossed, with any another inbred line, in order to produce a new line comprising either an increase or a decrease in the fertility level. Alternatively, a genetic trait which has been engineered into a particular line using the foregoing techniques could be moved into another line using traditional backcrossing techniques that are well known in the plant breeding arts. For example, a backcrossing approach could be used to move an engineered trait from a public, non-elite inbred line into an elite inbred line, or from an inbred line containing a foreign gene in its genome into an inbred line or lines which do not contain that gene. As used herein, “crossing” can refer to a simple X by Y cross, or the process of backcrossing, depending on the context.

[0235] The wheat plant of the disclosure is a also a wheat plant wherein one or more desired traits have further been introduced through backcrossing methods, whether such trait is a naturally occurring one or not.

[0236] The disclosure also relates to the use of the wheat plant as described above or its seeds, for food applications, preferably for flour production and for feed applications, or for breeding applications, for example for use as a parent plant in breeding for improving agronomical value of a wheat plant, line, hybrid or variety.

[0237] As used herein, breeding applications encompass pedigree breeding to improve the agronomical value of a plant, line, hybrid, or variety.

[0238] The wheat plants disclosed herein are further useful, for example, for producing flour or for feed applications.

[0239] Seeds harvested from plants described herein can be used to make flour by any available techniques in the art. The wheat plants or their flour are also useful as food compositions, for human or animal.

[0240] The Examples below are given for illustration purposes only.

### SPECIFIC EMBODIMENTS

[0241] 1. An isolated nucleic acid encoding a protein restorer of fertility of T. timopheevii, wherein the corresponding amino acid sequence has at least 95% identity to an amino acid sequence chosen amongst any one of SEQ ID NO:1 to SEQ ID NO:1554.
[0242] 2. The nucleic acid of Embodiment 1, encoding a Rf1 protein restorer of fertility of T. timopheevii CMS cytoplasm, wherein the corresponding amino acid sequence has at least 95% identity, preferably at least 96%, 97%, 98%, 99% or 100% identity to an amino acid sequence selected from the group consisting of SEQ ID NOs1-2, SEQ ID NOs288-290, SEQ ID NOs293-296, SEQ ID NOs343-346, SEQ ID NOs349-354, SEQ ID NOs359, 361 and 362, SEQ ID NOs 396 and 397, SEQ ID NOs428-430, SEQ ID NO517 and 519, SEQ ID NOs752-754, SEQ ID NOs1092, 1093 and 1095.
[0243] 3. The nucleic acid of Embodiment 1, encoding a Rf1 protein restorer of fertility of T. timopheevii CMS cytoplasm, wherein the corresponding amino acid sequence has at least 95% identity, preferably at least 96%, 97%, 98%, 99% or 100% identity to SEQ ID NO:361.
[0244] 4. The nucleic acid of claim 1, encoding a Rf3 protein restorer of fertility of T. timopheevii CMS cytoplasm, wherein the corresponding amino acid sequence has at least 95% identity, preferably at least 96%, 97%, 98%, 99% or 100% identity to an amino acid selected from the group consisting of SEQ ID NOs:124 and 125, SEQ ID NO:147, SEQ ID NO:150, SEQ ID NO:156, SEQ ID NO:158, SEQ ID NO:297, SEQ ID NO:299, SEQ ID NOs:315-321, SEQ ID NOs:379-381, SEQ ID NOs:553 and 554, SEQ ID NOs:557 and 558, SEQ ID NOs:676 and 677, SEQ ID NOs:684 and 685, SEQ ID NOs:696 and 697, SEQ ID NOs:938 and 939 and SEQ ID NOs:1038 and 1039.
[0245] 5. The nucleic acid of Embodiment 4, encoding Rf3 protein restorer of fertility of T. timopheevii CMS cytoplasm, wherein the corresponding amino acid sequence has at least 95% identity, preferably at least 96%, 97%, 98%, 99% or 100% identity to an amino acid selected from the group consisting of SEQ ID NO: 158, SEQ ID NO: 676 and SEQ ID NO:684.
[0246] 6. The nucleic acid of Embodiment 1, encoding a Rf4 protein restorer of fertility of T. timopheevii CMS cytoplasm, wherein the corresponding amino acid sequence has at least 95% identity, preferably at least 96%, 97%, 98%, 99% or 100% identity to an amino acid selected from the group consisting of SEQ ID NO:477 and SEQ ID NOs3135-3138.
[0247] 7. The nucleic acid of Embodiment 1, encoding a Rf7 protein restorer of fertility of T. timopheevii CMS cytoplasm, wherein the corresponding amino acid sequence has at least 95% identity, preferably at least 96%, 97%, 98%, 99% or 100% identity to an amino acid sequence selected from the group consisting of SEQ ID NOs:240-243, SEQ ID NOs303-305, SEQ ID NO:363, SEQ ID NOs375-377, SEQ ID NOs497-499, SEQ ID NO:516, SEQ ID NOs709-711, SEQ ID NO:768.
[0248] 8. The nucleic acid of Embodiment 1 encoding for a Rf-rye protein restorer of fertility of T. timopheevii CMS cytoplasm, wherein the corresponding amino acid sequence has at least 95% identity, preferably at least 96%, 97%, 98%, 99% or 100% identity to an amino acid sequence selected from the group consisting of SEQ ID NO:227, SEQ ID NO:378 and SEQ ID NO:859.
[0249] 9. A recombinant nucleic acid comprising a nucleic acid encoding a protein restorer of T. timopheevii CMS cytoplasm of any one of Embodiments 1 to 8, operably linked to regulatory elements.
[0250] 10. A vector for use in transformation of a wheat plant, comprising the recombinant nucleic acid of Embodiment 9.
[0251] 11. A wheat transgenic plant comprising one or more nucleic acid(s) of any one of Embodiments 1-9, as transgenic element(s).
[0252] 12. The wheat transgenic plant of Embodiment 11, which is a fertile wheat plant restorer of T. timopheevii CMS cytoplasm and comprising a combination of at least two different transgenic elements, selected from the group consisting of Rf1, Rf3, Rf7 and Rf-rye nucleic acids of any one of Embodiments 1-9.
[0253] 13. The transgenic wheat plant of Embodiment 11 or 12, wherein said transgenic plant includes the following combination of nucleic acids as transgenic elements:
   [0254] a. a Rf1 nucleic acid encoding an amino acid sequence having at least 95% identity to any one of SEQ ID NOs359, 361, 362 or SEQ ID NOs428-430, and Rf3 nucleic acid encoding an amino acid sequence having at least 95% identity to any one of SEQ ID NOs:315-321, SEQ ID NOs:379-381, SEQ ID NOs:147 and 150, SEQ ID NOs:156 and 158, SEQ ID NOs297 and 299, SEQ ID NO:676 and SEQ ID NO:684,
   [0255] b. a Rf1 nucleic acid encoding an amino acid sequence having at least 95% identity to any one of SEQ ID NOs359, 361, 362 or SEQ ID NOs428-430, and Rf7 nucleic acid encoding an amino acid sequence having at least 95% identity to any one of SEQ ID NO:363, SEQ ID NO:516 and SEQ ID NO:768,
   [0256] c. a Rf1 nucleic acid encoding an amino acid sequence having at least 95% identity to any one of SEQ ID NOs359, 361, 362 or SEQ ID NOs428-430, and Rf-rye nucleic acid encoding an amino acid sequence having at least 95% identity to any one of SEQ ID NO:227, SEQ ID NO:378 and SEQ ID NO:859,
   [0257] d. a Rf3 nucleic acid encoding an amino acid sequence having at least 95% identity to any one of SEQ ID NOs:315-321, SEQ ID NOs:379-381, SEQ ID NOs:147 and 150, SEQ ID NOs:156 and 158, SEQ ID NOs297 and 299, SEQ ID NO:676 and SEQ ID NO:684, and Rf7 nucleic acid encoding an amino acid sequence having at least 95% identity to SEQ ID NO:363, SEQ ID NO:516 and SEQ ID NO:768,
   [0258] e. a Rf3 nucleic acid encoding an amino acid sequence having at least 95% identity to any one of SEQ ID NOs:315-321, SEQ ID NOs:379-381, SEQ ID NOs:147 and 150, SEQ ID NOs:156 and 158, SEQ ID NOs297 and 299, SEQ ID NO:676 and SEQ ID NO:684, and Rf-rye nucleic acid encoding an amino acid sequence having at least 95% identity to any one of SEQ ID NO:227, SEQ ID NO:378 and SEQ ID NO:859,
   [0259] f. a Rf7 nucleic acid encoding an amino acid sequence having at least 95% identity to SEQ ID NO:363, SEQ ID NO:516 and SEQ ID NO:768, and Rf-rye nucleic acid encoding an amino acid sequence having at least 95% identity to any one of SEQ ID NO:227, SEQ ID NO:378 and SEQ ID NO:859,
   [0260] g. a Rf1 nucleic acid encoding an amino acid sequence having at least 95% identity to any one of SEQ ID NOs359, 361, 362 or SEQ ID NOs428-430, and Rf3 nucleic acid encoding an amino acid sequence having at least 95% identity to any one of SEQ ID NOs:315-321, SEQ ID NOs:379-381, SEQ ID NOs:147 and 150, SEQ ID NOs:156 and 158, SEQ ID NOs297 and 299, SEQ ID NO:676 and SEQ ID NO:684, and Rf7 nucleic acid encoding an amino acid sequence having at least 95% identity to any one of SEQ ID NO:363, SEQ ID NO:516 and SEQ ID NO:768;
   [0261] h. a Rf1 nucleic acid encoding an amino acid sequence having at least 95% identity to any one of SEQ ID NOs359, 361, 362 or SEQ ID NOs428-430, and Rf3 nucleic acid encoding an amino acid sequence having at least 95% identity to any one of SEQ ID NOs:315-321, SEQ ID NOs:379-381, SEQ ID NOs:147 and 150, SEQ ID NOs:156 and 158, SEQ ID NOs297 and 299, SEQ ID NO:676 and SEQ ID NO:684, and Rf-rye nucleic acid encoding an amino acid sequence having at least 95% identity to any one of SEQ ID NO:227, SEQ ID NO:378 and SEQ ID NO:859;
   [0262] i. a Rf1 nucleic acid encoding an amino acid sequence having at least 95% identity to any one of SEQ ID NOs359, 361, 362 or SEQ ID NOs428-430, and Rf7 nucleic acid of Embodiment 4 encoding an amino acid sequence having at least 95% identity to any one of SEQ ID NO:363, SEQ ID NO:516 and SEQ ID NO:768, and Rf-rye nucleic acid encoding an amino acid sequence having at least 95% identity to any one of SEQ ID NO:227, SEQ ID NO:378 and SEQ ID NO:859; or,
   [0263] j. a Rf3 nucleic acid encoding an amino acid sequence having at least 95% identity to any one of SEQ ID NOs:315-321, SEQ ID NOs:379-381, SEQ ID NOs:147 and 150, SEQ ID NOs:156 and 158, SEQ ID NOs297 and 299, SEQ ID NO:676 and SEQ ID NO:684, and Rf7 nucleic acid encoding an amino acid sequence having at least 95% identity to any one of SEQ ID NO:363, SEQ ID NO:516 and SEQ ID NO:768, and Rf-rye nucleic acid encoding an amino acid sequence having at least 95% identity to any one of SEQ ID NO:227, SEQ ID NO:378 and SEQ ID NO:859.
[0264] 14. The transgenic wheat plant of Embodiment 13, which further contains a Rf4 nucleic acid encoding a Rf4 protein restorer of fertility of T. timopheevii CMS cytoplasm, in combination with one, two, three or four of any of the restorer nucleic acid encoding Rf1, Rf3, Rf7 or Rf-rye protein, wherein the corresponding amino acid sequence has at least 95% identity, preferably at least 96%, 97%, 98%, 99% or 100% identity to an amino acid selected from the group consisting of SEQ ID NO:477 and SEQ ID NOs3135-3138.
[0265] 15. The transgenic wheat plant of any one of Embodiments 11-14, wherein said one or more transgenic element(s) express polypeptides which restore or improve male fertility to the plant as compared to the parent plant without such transgenic element(s).
[0266] 16. Method for producing a wheat transgenic plant of any one of Embodiments 11-15, wherein the method comprises the steps of transforming a parent wheat plant with one or more nucleic acids encoding protein restorer of T. timopheevii CMS cytoplasm according to any one of Embodiments 1-9, selecting a plant comprising said one or more nucleic acid(s) as transgene(s), regenerating and growing said wheat transgenic plant.
[0267] 17. A method for producing a wheat plant carrying a Rf3 restorer of fertility, said method comprising (i) providing a parent wheat plant comprising in its genome at least a 163 bp fragment of SEQ ID NO:3174, and (ii) deleting a region of at least 10 bp in said fragment of SEQ ID NO:3174, for example at least 20 bp, 30 bp, 40 bp, 50 bp, 60 bp, 70 bp, 80 bp, 90 bp, 100 bp, 110 bp, 120 bp, 130 bp, 140 bp, 150 bp, 160 bp or the whole fragment of SEQ ID NO:3174 in the genome of said wheat plant, thereby obtaining said wheat plant carrying a Rf3 restorer of fertility.
[0268] 18. The method of Embodiment 17, wherein the fertility score of the obtained wheat plant has a fertility score higher than the parent wheat plant.
[0269] 19. The method of Embodiment 17 or 18, wherein the parent wheat plant has a fertility score below 1, for example comprised between 0.5 and 1.0 and the obtained wheat plant has a fertility score above 1.0, for example comprised between 1.0 and 2.0.
[0270] 20. A wheat plant carrying Rf3 restorer of fertility, as obtained by the method of any one of Embodiments 17-19, wherein only a part but not the whole genomic fragment of SEQ ID NO:3174 is deleted in the genome of said wheat plant.
[0271] 21. A method for assessing fertility restoration in a wheat plant, said method comprising determining the presence or absence of a fragment of SEQ ID NO:3174 in the genome of said plant, wherein the presence of the whole fragment is indicative of a weak restoration of fertility and a deletion of at least a part of such fragment or the whole fragment of SEQ ID NO:3174 is indicative of a strong restoration of fertility.
[0272] 22. A nucleic acid probe for use in a method of any one of Embodiments 17-21, characterized it consists of a nucleic acid of at least 10 nucleotides within SEQ ID NO:3174.
[0273] 23. A wheat plant restorer of fertility of T. timopheevii CMS cytoplasm, wherein the plant comprises at least three fertility restorer alleles within the restorer loci chosen amongst Rf1, Rf3, Rf4 and Rf7 wherein,
   [0274] a. the Rf1 locus is located at most 10 cM from marker cfn0522096 of SEQ ID NO:3190 or marker cfn05277067 of SEQ ID NO: 3196,
   [0275] b. the Rf3 locus is located at most 10 cM from marker cfn1249269 of SEQ ID NO:3205 or marker BS00090770 of SEQ ID NO:3228,
   [0276] c. the Rf7 locus is located at most 10 cM from marker cfn0919993 of SEQ ID NO:3231, and,
   [0277] d. the Rf4 locus is located at most 10 cM from marker cfn0393953 of SEQ ID NO:3233.
[0278] 24. The wheat plant of Embodiment 23, wherein the plant comprises the Rf1, Rf3 and Rf7 restorer alleles.
[0279] 25. The wheat plant of any one of Embodiments 23 to 24, characterized in that it includes at least one Rf1 restorer allele within the Rf1 locus, said Rf1 restorer allele being located within the chromosomal interval between SNP markers cfn0522096 of SEQ ID NO:3190 and cfn05277067 of SEQ ID NO:3196.
[0280] 26. The wheat plant of Embodiment 25, wherein said Rf1 locus is characterized by the presence of one or more of the following SNP allele(s):

| | | Marker SEQ ID | |
|---|---|---|---|
| SNP# | Marker Name | NO: | Restorer Allele |
| SNP1 | cfn523072 | 3187 | T |
| SNP2 | cfn0523109 | 3188 | A |
| SNP3 | 276I13_96B22_97797 | 3189 | C |
| SNP4 | cfn0522096 | 3190 | C |
| SNP5 | cfn0527763 | 3191 | C |
| SNP6 | 104A4_105172 | 3192 | TG |
| SNP7 | 104A4_105588 | 3193 | A |
| SNP8 | cfn0373248 | 3194 | T |
| SNP9 | cfn1097828 | 3195 | C |
| SNP10 | cfn0527067 | 3196 | A |
| SNP11 | cfn0528390 | 3197 | G |
| SNP12 | BWS0267 | 3198 | A |
| SNP13 | cfn0527718 | 3199 | T |
| SNP14 | cfn0524469 | 3200 | G |
| SNP15 | cfn0524921 | 3201 | G |
| SNP16 | cfn1122326 | 3202 | C |

[0281] 27. The wheat plant of Embodiment 26, wherein the Rf1 locus is characterized by the haplotype “C” and “A” of the SNP3 and SNP7 restorer alleles as described in the table of Embodiment 5.
[0282] 28. The wheat plant of any one of Embodiments 23 to 27, characterized in that it includes at least one Rf3 restorer allele within the Rf3 locus, said Rf3 restorer allele being located within the chromosomal fragment between SNP markers cfn1249269 and BS00090770.
[0283] 29. The wheat plant of Embodiment 28, wherein said Rf3 locus is characterized by the presence of one or more of the following SNP allele(s):

| SNP# | Marker Name | Marker SEQ ID | Restorer Allele |
|---|---|---|---|
| SNP17 | cfn1252000 | 3203 | A |
| SNP18 | IWB14060* | 3204 | G |
| SNP19 | cfn1249269 | 3205 | G |
| SNP20 | 219K1_166464 | 3206 | T |
| SNP21 | 219K1_158251 | 3207 | G |
| SNP22 | 219K1_111446 | 3208 | A |
| SNP23 | 219K1_110042 | 3209 | T |
| SNP24 | 219K1_110005 | 3210 | C |
| SNP25 | 219K1_107461 | 3211 | A |
| SNP26 | 219K1_99688 | 3212 | T |
| SNP27 | 219K1_37 | 3213 | C |
| SNP28 | cfn1270524 | 3214 | T |
| SNP29 | 136H5_3M5_7601 | 3215 | T |
| SNP30 | cfn1288811 | 3216 | G |
| SNP31 | 136H5_3M5_89176 | 3217 | A |
| SNP32 | 136H5_3M5_89263 | 3218 | T |
| SNP33 | 136H5_3M5_138211 | 3219 | T |
| SNP34 | cfn0556874 | 3220 | C |
| SNP35 | 136H5_3M5_64154 | 3221 | C |
| SNP36 | 136H5_3M5_68807 | 3222 | G |
| SNP37 | 136H5_3M5_77916 | 3223 | A |
| SNP38 | cfn1246088 | 3224 | A |
| SNP39 | cfn1287194 | 3225 | G |
| SNP40 | cfn1258380 | 3226 | A |
| SNP41 | IWB72107* | 3227 | A |
| SNP42 | BS00090770 | 3228 | T |
| SNP43 | cfn1239345 | 3229 | A |

[0284] 30. The wheat plant of Embodiment 29, wherein the Rf3 locus is characterized by the haplotype “T” and “A” of the SNP29 and SNP31 restorer alleles as described in the table of Embodiment 7.
[0285] 31. The wheat plant of any one of Embodiments 23 to 30, wherein the Rf7 locus is characterized by the presence of one or more of the following restorer SNP allele(s):

| SNP# | Marker Name | Marker SEQ ID | Restorer Allele |
|---|---|---|---|
| SNP44 | cfn0917304 | 3230 | T |
| SNP45 | cfn0919993 | 3231 | G |
| SNP46 | cfn0920459 | 3232 | C |
| SNP49 | cfn0915987 | 3445 | G |
| SNP50 | cfn0920253 | 3446 | A |
| SNP51 | cfn0448874 | 3447 | T |
| SNP52 | cfn0923814 | 3448 | C |
| SNP53 | cfn0924180 | 3449 | G |
| SNP54 | cfn0919484 | 3450 | G |

[0286] 32. The wheat plant of any one of Embodiments 23 to 31, wherein the Rf4 locus is characterized by the presence of one or more of the following SNP allele(s), preferably by the haplotype “C” and “G” of the SNP47 and SNP48 restorer alleles:

| SNP# | Marker Name | Marker SEQ ID | Restorer Allele |
|---|---|---|---|
| SNP47 | cfn0393953 | 3233 | C |
| SNP48 | cfn0856945 | 3234 | G |

[0287] 33. The wheat plant of any one of Embodiments 23-32, wherein representative alleles of Rf1, Rf3, Rf4 and Rf7 restorer alleles are provided by the seed sample chosen amongst: NCIMB 42811, NCIMB 42812, NCIMB 42813, NCIMB 42814, NCIMB 42815, NCIMB 42816, and NCIMB 42817.
[0288] 34. The wheat plant according to any one of the Embodiments 23 to 33, wherein said wheat plant is alloplasmic and comprises the T. timopheevii cytoplasm.
[0289] 35. A method of identifying a wheat plant according to any one of Embodiments 23 to 34, wherein said wheat plant is identified by detecting the presence of at least one restorer allele genetically associated with the restorer loci chosen amongst Rf1, Rf3, Rf4 and Rf7 loci.
[0290] 36. Means for detecting one or more of SNPs of SEQ ID NOs 3187-3235.
[0291] 37. The means according to Embodiment 36 consisting of one or more primers including any one of the following: SEQ ID NOs 3253-3444.
[0292] 38. Method of production of a wheat hybrid plant comprising the steps of:
   [0293] a. crossing a sterile female wheat plant comprising the T. timopheevii cytoplasm with a fertile male wheat plant according to any one of Embodiments 23 to 34;
   [0294] b. collecting the hybrid seed;
   [0295] c. optionally detecting the presence of T. timopheevii cytoplasm, and/or at least three of the Rf locus chosen amongst Rf1, Rf3, Rf4 and Rf7 in the hybrid seed; and,
   [0296] d. optionally detecting hybridity level of the hybrid seed.

### LEGENDS OF THE FIGURES

[0297] FIGS. 1A and 1B is a table showing a summary of plant genomes used in the study and number of identified RFLs. In total, the analyses encompassed 16 genome data sets from Triticeae and 13 from Oryzeae, respectively, as well as single data sets from Brachypodium distachyon, tef (Eragrostis tef), rye (Secale cereale), foxtail millet (Setaria italica), sorghum (Sorghum bicolor) and maize (Zea mays). Lolium perenne and Triticum turgidum transcriptome data sets were used as well.

[0298] FIG. 2: Processing of orf256 in T-CMS wheat mitochondria (A) Structure of orf256 identified in the T. timopheevii mitochondrial genome. The binding site of the WORF256 probe (Song and Hedgoth 1994) used in the Northern blot analysis is indicated. (B) Differential processing of the orf256 in wheat lines with different restoring capabilities. No orf256 transcript was detected in T. aestivum, Primepii, Anapurna and Wheat-Rye-6R (WR_6R) lines. An additional, third band detected in R197 and R0934F accessions is indicated by asterisks. As a control for gel loading the picture of ethidium bromide (EtBr) stained agarose gel is shown.

[0299] FIG. 3: FIG. 3 shows the list of RFL groups potentially corresponding to the Rf4 gene.

[0300] FIGS. 4a and 4b: FIGS. 4A and 4B show respectively the alignment between nucleotide sequences of RFL120-spelt (Subject) (SEQ ID NO: 3136) with RFL120-timo (Query) (SEQ ID NO: 477) and amino acid sequences RFL120-17F3R-0377_1 (SEQ ID NO: 3135), RFL120-L13_1 (SEQ ID NO: 3137), RFL120-R113_1 (SEQ ID NO: 3138), RFL120-timo_1 (SEQ ID NO: 477), and RFL120-GSTR435_1 (SEQ ID NO: 3136).

[0301] FIG. 5A: FIG. 5A shows the protein sequence alignment of RFL29a (SEQ ID NO: 3146), RFL29b (SEQ ID NO: 3149), RFL29c_1 (SEQ ID NO: 3458) and RFL29c_2 (SEQ ID NO: 3459).

[0302] FIGS. 5B and 5C: FIGS. 5B and 5C respectively, show the protein sequence alignments of RFL164a (SEQ ID NO: 3147) and RFL164b (SEQ ID NO: 3144), and RFL166a (SEQ ID NO: 3148) and RFL166b (SEQ ID NO: 3145).

[0303] FIG. 6: FIG. 6 shows an alignment of the 5′UTR regions as identified in the RFL29a (SEQ ID NO: 3460) and RFL29b genes (SEQ ID NO: 3461).

[0304] FIG. 7: FIG. 7 shows the position of the different target sequences around and within the 163 bp region (SEQ ID NO: 3155) identified for different endonucleases.

[0305] FIG. 8: The FIG. 8 shows the relative position of the Rf1 mapping intervals identified on our internal consensus genetic map.

[0306] FIG. 9: The FIG. 9 shows the relative position of the Rf3 mapping intervals identified on our internal consensus genetic map.

[0307] FIG. 10: The FIG. 10A shows position of the markers within the chromosomal interval of Rf1 locus. Left and right refer to the marker positions relative to the interval defined by cfn0522096 and cfn0527067 SNP markers. Interval refers to markers located within the mapping interval. The physical positions correspond to LG internal ordering of the scaffolds of the IWGSC Whole genome assembly, ‘IWGSC WGA’.

[0308] The FIGS. 10B, 10C, 10D show a subset of the diversity panel showing the haplotypes at the Rf1 locus for the restorer lines used in the genetic mapping (R197, R204, R0932E), derived lines LGWR16-0016 and LGWR16-0026 and a collection of maintainer lines. “-”: correspond to dominant markers with no amplification in several maintainer lines. “H”: means heterozygote status wherein two alleles are detected.

[0309] FIG. 11: The FIG. 11A shows the position of the markers within the chromosomal interval of Rf3 locus. Left and right refer to the marker positions relative to the interval defined by cfn1249269 and BS00090770 markers. Interval refers to markers located within the mapping interval. The physical positions correspond to LG internal ordering of the scaffolds of the IWGSC Whole genome assembly, ‘IWGSC WGA’. *IWB14060 and IWB72107 are described in Geyer and al, 2016.

[0310] The FIGS. 11B, 11C, 11D show a subset of the diversity panel showing the haplotypes at the Rf3 locus for the restorer lines LGWR16-0016 and LGWR16-0026, the TJB155 line used as restorer parental line in Rf3 QTL mapping and a series of maintainer lines.

[0311] “-” corresponds to dominant markers with no amplification in several maintainer lines. “H” means heterozygote status wherein two alleles are detected.

[0312] FIG. 12: The FIG. 12 shows nucleotide sequence alignment between RFL29a (SEQ ID NO: 3146) and RFL29c (SEQ ID NO: 3157) fragment sequences. The PAM motif and target sequence for CRISPR edition are respectively is in bold and underligned.

### EXAMPLES

### Example 1: Identification of 1188 RFL-PPR Sequences in Cereals

[0313] 32 genomic and two transcriptome data sets from 27 cereal plant species and their wild relatives were downloaded from the public sequence depositories and analysed. A complete list of files and databases from which they were downloaded is presented in FIG. 1.

[0314] The DNA sequences were screened for open reading frames (ORFs) in six-frame translations with the getorf program of the EMBOSS 6.6.0 package (Rice et al., 2000). Predicted ORFs longer than 92 codons were screened for the presence of P- and PLS-class pentatricopeptide repeat (PPR) motifs using hmmsearch from the HMMER 3.1b package (hmmer.org) and hidden Markov models defined by hmmbuild (Cheng et al., 2016). The post-processing of hmmsearch results was carried out according to rules described previously (Cheng et al., 2016). Sequences containing 10 or more P-class PPR motifs were retained for further analysis, as a previous study has shown that Restorer-to-Fertility-Like (RFL) genes are primarily comprised of tandem arrays of 15 to 20 PPR motifs (Fujii et al., 2011).

[0315] For identification of RFL sequences among the P-class PPRs, the OrthoMCL algorithm (Li et al., 2003) was used via the OrthoMCL-DB website to cluster P-class PPR proteins from each data set (http://www.orthomcl.org/orthomcl/). The resulting output files were screened for groups containing reference RFLs (Fujii et al., 2011).

[0316] In total, 633 RFLs were identified in the 34 cereal data sets by OrthoMCl analysis (see Table of FIGS. 1A and 1B). In addition, WGS data sets of 44 sorghum accessions including landraces and wild relatives (Mace et al., 2013) were analyzed and 517 additional RFL sequences were identified and included in the study (see Table of FIGS. 1A and B).

### Example 2: Identification of Full Length RFL PPR Genes Potentially Involved in Fertility Restoration of T. timopheevii CMS in Wheat by Targeted Capture of RFL Genes

### A. Selection of Germplasm Accessions:

[0317] Six wheat accessions were identified as potential restorer lines of Timopheevii-type CMS (T-CMS) derived from the interspecific cross between Triticum timopheevi and Triticum aestivum.

[0318] The first accession is a wheat-rye addition line, “Wheat-Rye-6R”, wherein the Rf gene was mapped on the additional long arm of 6R chromosome of rye Secale cereale (Curtis and Lukaszewski, 1993). Four other wheat accessions are characterized by the presence of at least one of the mapped restorer genes in wheat: Rf1, Rf3 and Rf7. The commercial variety, Primepii, carries the Rf3 gene, and three Limagrain lines R197, R0934F and R0932E respectively carry both Rf1 and Rf7 genes, Rf3 or Rf1.

[0319] The sixth accession, named Anapurna, is a maintainer line not able to restore T-CMS and carries no known Rf genes. Anapurna is considered as the negative control in this experiment. In addition, a T. timopheevii line was included in the study as it is a fertile line expected to harbor more than one Rf gene able to restore T-type CMS (Wilson and Ross, 1962). To some extent, this line is considered as a positive control in this experiment.

[0320] All six accessions were verified in regard to their restorer status by genetic analysis.

[0321] Northern blot analysis was performed with restorer and sterile accessions using an orf256-specific probe (FIG. 2A). Orf256 was previously identified as a gene specific to the T. timopheevii mitochondrial genome (Rathburn and Hedgcoth, 1991; Song and Hedgcoth, 1994). The sequence from −228 to +33 of orf256 (numbering relative to the start codon) is identical to the homologous region of the cox/gene (encoding subunit 1 of mitochondrial complex IV) in T. aestivum, whereas the rest of orf256, including the 3′ flanking region, is unrelated to cox/(FIG. 2A). Different patterns of orf256 transcript processing in the fertile T. timopheevii line and fertile restorer lines carrying the T. timopheevii cytoplasm were observed when compared to the sterile CMS line pattern which is coherent with the genetic analysis (FIG. 2B). The different processing patterns are consistent with (but not conclusive proof that) orf256 is involved in causing CMS.

B. Bait Design and RFL-Capture from Different Wheat Genotypes:

[0322] The 1188 RFL PPR sequences identified by our bioinformatics analysis underwent a pre-treatment process that included masking of the target sequences against wheat mitochondrial and chloroplastic genome sequences (accessions NC_007579.1 and AB042240) as well as repeated elements of wheat genome. The masked target sequences were used for capture probe design. Briefly, probes were designed to cover the target sequences with a frequency masking algorithm intended to rule out probes that match with high copy number sequences in the targeted genome(s). The final probes were synthetized as a probe pool.

[0323] Seeds of each accession were sown and plantlets were grown in etiolated conditions. After DNA extraction, Illumina libraries (referred to as NGS libraries) were prepared from DNA fragments around 600 bp with the KAPA Biosystems chemistry according to the manufacturer's recommendations.

[0324] The NGS libraries were then specifically enriched in RFL sequences using the probe pool and a capture protocol. The efficiency of the capture was confirmed by a specific qPCR assay and ultimately libraries were pooled and sequenced in paired-end mode with 300 nt read length on a MiSeq platform.

### C. Assembly of Full-Length Gene Sequences Encoding RFL Proteins and Identification of Putative Orthologous Groups:

[0325] Sequence reads from the RFL capture experiment were assembled into full-length contigs spanning one or more sequences encoding RFL proteins as described below. Overlapping paired reads were merged into a single sequence using bbmerge from the bbmap package (https://sourceforge.net/projects/bbmap/) with the parameters qtrim2=t trimq=10, 15, 20 minq=12 mininsert=150. Read pairs that could not be merged were discarded. The merged reads were downsampled to 300,000 reads using reformat.sh in the bbmap package (samplereadstarget=300000). The merged and downsampled reads were assembled with Geneious 8 (set to Medium Sensitivity/Fast) (http://www.geneious.com/). Finally, contigs composed of more than 100 merged reads were retained for further analysis, with most of these composed of over 1000 reads. In this way, a total of 1457 contigs were generated (Table 6).

[0326] Approximately 220 contigs were obtained from each accession, except for Triticum timopheevii for which only 138 contigs were assembled. This is consistent with the tetraploid nature of the Triticum timopheevii genome. The consistency of the results indicates that the RFL-capture experiment was, a priori, comprehensive.

TABLE 6
Number of RFL contigs and ORFs identified per accession and number
of orthologous groups to which the ORFs were assigned with CD-hit.

| | Number of assembled | Number of | Number of orthologous | Number of RFL ORFs >350 |
|---|---|---|---|---|
| Accession | contigs composed | identified RFL | groups with at least one | aa assigned to |
| name | of >100 reads | ORFs >210 aa* | RFL from the accession | orthologous groups |
| Anapurna | 211 | 221 | 202 | 156 |
| Primepii | 226 | 234 | 215 | 162 |
| R197 | 219 | 241 | 219 | 174 |
| R0932E | 221 | 245 | 221 | 183 |
| R0934F | 223 | 237 | 215 | 174 |
| Triticum | 138 | 143 | 129 | 114 |
| timopheevi | | | | |
| Wheat-Rye-6R | 219 | 233 | 212 | 163 |
| TOTAL | 1457 | 1554 | 397 (non-redundant) | 1254 |

[0327] Sequences encoding RFL proteins were identified within these contigs as follows.

[0328] Open reading frames (ORFs) within the contigs were identified with getorf from the EMBOSS package (Rice et al. 2000) using the parameters -minsize 630 -find 0 -reverse true. Thus only ORFs longer than 210 amino acids were used for further analysis. In total, 1554 ORFs were identified across the seven accessions (Table 6). The number of ORFs per accession ranged from 143 ORFs in T. timopheevii to 245 in R0934F (Table 6). The ORFs were further analyzed using hmmsearch (with parameters -E 0.1 --domE 100) from the HMMER package (v3.1b1) to detect PPR motifs using the hidden Markov models developed by Cheng et al. (2016) and the post-processing steps described in the same paper. Finally, to identify putatively orthologous RFL sequences across all seven accessions, the 1554 RFL ORFs were clustered using CD-hit (settings -c 0.96 -n 5 -G 0 -d 0 -AS 60 -A 105 -g 1). Across all accessions, 397 non-redundant RFL clusters representing putatively orthologous groups were obtained (Table 6). We define an orthologous RFL group as a set of at least one RFL ORF from at least one accession and wherein, if at least two sequences are present, these sequences share at least 96% sequence identity over the alignment length. Some highly conserved RFL genes are present in all seven accessions, others are found in only a subset of the accessions, or in a single accession. In most cases, each orthologous RFL group contains only one RFL protein from each accession.

[0329] Table 7 below is showing the different RFL groups, the corresponding ORF names and the corresponding protein sequence number and DNA encoding protein sequence number.

[0330] However, we found that genes encoding RFL-PPR proteins are often inactivated by indels creating frameshifts that break the contiguity of the ORFs, resulting in two shorter ORFs corresponding to a single longer ORF in another accession. In these cases, both shorter ORFs could be within the same orthologous group. In our analysis, only ORF encoding more than 350 amino acids were considered as possibly functional. This threshold was used as it corresponds to 10 PPR motifs (each of 35 amino acids), and all known active Rf proteins contain at least this number of motifs (usually 15-20).

[0331] Finally, a set of 397 orthologous RFL groups were identified and numbered from 1 to 397 (see Table 7 below).

TABLE 7

| RFL-Name | Name | SEQID-PRT1 | SEQID-DNA |
|---|---|---|---|
| RFL 1 | R0932E.300k_Assembly_Contig_60_2 | 1 | 1555 |
| RFL 1 | R197.300k_Assembly_Contig_73_2 | 2 | 1556 |
| RFL 2 | R0934F.300k_Assembly_Contig_11_2 | 3 | 1557 |
| RFL 2 | Anapurna.300k_Assembly_Contig_47_1 | 4 | 1558 |
| RFL 2 | Primepii.300k_Assembly_Contig_16_2 | 5 | 1559 |
| RFL 2 | R0932E.300k_Assembly_Contig_39_1 | 6 | 1560 |
| RFL 2 | R197.300k_Assembly_Contig_31_1 | 7 | 1561 |
| RFL 2 | Wheat-Rye-6R.300k_Assembly_Contig_13_1 | 8 | 1562 |
| RFL 3 | R0934F.300k_Assembly_Contig_34_2 | 9 | 1563 |
| RFL 3 | R0932E.300k_Assembly_Contig_41_1 | 10 | 1564 |
| RFL 3 | Wheat-Rye-6R.300k_Assembly_Contig_44_1 | 11 | 1565 |
| RFL 3 | Primepii.300k_Assembly_Contig_27_2 | 12 | 1566 |
| RFL 3 | R197.300k_Assembly_Contig_34_1 | 13 | 1567 |
| RFL 3 | Anapurna.300k_Assembly_Contig_21_1 | 14 | 1568 |
| RFL 4 | R197.300k_Assembly_Contig_38_2 | 15 | 1569 |
| RFL 4 | Anapurna.300k_Assembly_Contig_48_2 | 16 | 1570 |
| RFL 4 | Primepii.300k_Assembly_Contig_39_2 | 17 | 1571 |
| RFL 4 | R0932E.300k_Assembly_Contig_47_1 | 18 | 1572 |
| RFL 4 | R0934F.300k_Assembly_Contig_44_1 | 19 | 1573 |
| RFL 4 | Wheat-Rye-6R.300k_Assembly_Contig_32_2 | 20 | 1574 |
| RFL 4 | Triticum- | 21 | 1575 |
| | timopheevii.300k_Assembly_Contig_19_2 | | |
| RFL 5 | Primepii.300k_Assembly_Contig_9_3 | 22 | 1576 |
| RFL 5 | R0934F.300k_Assembly_Contig_7_3 | 23 | 1577 |
| RFL 5 | Anapurna.300k_Assembly_Contig_15_3 | 24 | 1578 |
| RFL 5 | R197.300k_Assembly_Contig_12_3 | 25 | 1579 |
| RFL 5 | R0932E.300k_Assembly_Contig_11_2 | 26 | 1580 |
| RFL 5 | Wheat-Rye-6R.300k_Assembly_Contig_9_2 | 27 | 1581 |
| RFL 5 | Triticum- | 28 | 1582 |
| | timopheevii.300k_Assembly_Contig_9_2 | | |
| RFL 6 | Wheat-Rye-6R.300k_Assembly_Contig_99_1 | 29 | 1583 |
| RFL 6 | Primepii.300k_Assembly_Contig_109_1 | 30 | 1584 |
| RFL 6 | Anapurna.300k_Assembly_Contig_99_2 | 31 | 1585 |
| RFL 6 | Anapurna.300k_Assembly_Contig_99_1 | 32 | 1586 |
| RFL 7 | Anapurna.300k_Assembly_Contig_82_1 | 33 | 1587 |
| RFL 7 | Primepii.300k_Assembly_Contig_25_1 | 34 | 1588 |
| RFL 7 | R0934F.300k_Assembly_Contig_86_1 | 35 | 1589 |
| RFL 7 | R197.300k_Assembly_Contig_11_1 | 36 | 1590 |
| RFL 7 | R0932E.300k_Assembly_Contig_61_1 | 37 | 1591 |
| RFL 7 | Wheat-Rye-6R.300k_Assembly_Contig_34_1 | 38 | 1592 |
| RFL 8 | R0932E.300k_Assembly_Contig_85_1 | 39 | 1593 |
| RFL 8 | Wheat-Rye-6R.300k_Assembly_Contig_79_2 | 40 | 1594 |
| RFL 8 | R0934F.300k_Assembly_Contig_87_2 | 41 | 1595 |
| RFL 8 | Primepii.300k_Assembly_Contig_64_1 | 42 | 1596 |
| RFL 8 | R197.300k_Assembly_Contig_71_2 | 43 | 1597 |
| RFL 8 | Anapurna.300k_Assembly_Contig_54_2 | 44 | 1598 |
| RFL 9 | R0932E.300k_Assembly_Contig_66_1 | 45 | 1599 |
| RFL 9 | Wheat-Rye-6R.300k_Assembly_Contig_69_1 | 46 | 1600 |
| RFL 9 | Primepii.300k_Assembly_Contig_59_1 | 47 | 1601 |
| RFL 9 | R197.300k_Assembly_Contig_51_1 | 48 | 1602 |
| RFL 9 | R0934F.300k_Assembly_Contig_89_1 | 49 | 1603 |
| RFL 9 | Anapurna.300k_Assembly_Contig_66_1 | 50 | 1604 |
| RFL 10 | Primepii.300k_Assembly_Contig_62_2 | 51 | 1605 |
| RFL 10 | Anapurna.300k_Assembly_Contig_179_1 | 52 | 1606 |
| RFL 10 | Anapurna.300k_Assembly_Contig_70_1 | 53 | 1607 |
| RFL 10 | R0932E.300k_Assembly_Contig_34_2 | 54 | 1608 |
| RFL 10 | Primepii.300k_Assembly_Contig_191_1 | 55 | 1609 |
| RFL 10 | R197.300k_Assembly_Contig_189_1 | 56 | 1610 |
| RFL 10 | Triticum- | 57 | 1611 |
| | timopheevii.300k_Assembly_Contig_13_1 | | |
| RFL 10 | R197.300k_Assembly_Contig_64_1 | 58 | 1612 |
| RFL 10 | Wheat-Rye-6R.300k_Assembly_Contig_62_2 | 59 | 1613 |
| RFL 10 | Wheat-Rye-6R.300k_Assembly_Contig_190_1 | 60 | 1614 |
| RFL 10 | R0934F.300k_Assembly_Contig_29_1 | 61 | 1615 |
| RFL 11 | Anapurna.300k_Assembly_Contig_14_2 | 62 | 1616 |
| RFL 11 | R0934F.300k_Assembly_Contig_14_2 | 63 | 1617 |
| RFL 11 | R0934F.300k_Assembly_Contig_14_1 | 64 | 1618 |
| RFL 11 | Triticum- | 65 | 1619 |
| | timopheevii.300k_Assembly_Contig_22_1 | | |
| RFL 11 | Primepii.300k_Assembly_Contig_38_2 | 66 | 1620 |
| RFL 11 | Triticum- | 67 | 1621 |
| | timopheevii.300k_Assembly_Contig_22_2 | | |
| RFL 11 | R197.300k_Assembly_Contig_33_1 | 68 | 1622 |
| RFL 11 | R0932E.300k_Assembly_Contig_27_2 | 69 | 1623 |
| RFL 11 | R197.300k_Assembly_Contig_33_2 | 70 | 1624 |
| RFL 11 | R0932E.300k_Assembly_Contig_27_1 | 71 | 1625 |
| RFL 11 | Wheat-Rye-6R.300k_Assembly_Contig_12_2 | 72 | 1626 |
| RFL 12 | R197.300k_Assembly_Contig_119_1 | 73 | 1627 |
| RFL 12 | Wheat-Rye-6R.300k_Assembly_Contig_115_1 | 74 | 1628 |
| RFL 12 | R0932E.300k_Assembly_Contig_120_2 | 75 | 1629 |
| RFL 13 | Anapurna.300k_Assembly_Contig_8_3 | 76 | 1630 |
| RFL 13 | Primepii.300k_Assembly_Contig_8_2 | 77 | 1631 |
| RFL 13 | R0932E.300k_Assembly_Contig_8_2 | 78 | 1632 |
| RFL 13 | R197.300k_Assembly_Contig_25_2 | 79 | 1633 |
| RFL 13 | Wheat-Rye-6R.300k_Assembly_Contig_21_2 | 80 | 1634 |
| RFL 13 | R0934F.300k_Assembly_Contig_18_2 | 81 | 1635 |
| RFL 14 | R0932E.300k_Assembly_Contig_24_1 | 82 | 1636 |
| RFL 14 | R0934F.300k_Assembly_Contig_10_1 | 83 | 1637 |
| RFL 14 | Wheat-Rye-6R.300k_Assembly_Contig_26_1 | 84 | 1638 |
| RFL 14 | R197.300k_Assembly_Contig_23_1 | 85 | 1639 |
| RFL 14 | Primepii.300k_Assembly_Contig_11_1 | 86 | 1640 |
| RFL 14 | Anapurna.300k_Assembly_Contig_13_1 | 87 | 1641 |
| RFL 15 | R197.300k_Assembly_Contig_29_1 | 88 | 1642 |
| RFL 15 | Anapurna.300k_Assembly_Contig_28_1 | 89 | 1643 |
| RFL 15 | R0934F.300k_Assembly_Contig_20_1 | 90 | 1644 |
| RFL 15 | Triticum- | 91 | 1645 |
| | timopheevii.300k_Assembly_Contig_11_2 | | |
| RFL 15 | R0932E.300k_Assembly_Contig_38_1 | 92 | 1646 |
| RFL 15 | Wheat-Rye-6R.300k_Assembly_Contig_6_1 | 93 | 1647 |
| RFL 15 | Primepii.300k_Assembly_Contig_22_1 | 94 | 1648 |
| RFL 16 | Primepii.300k_Assembly_Contig_23_2 | 95 | 1649 |
| RFL 16 | R197.300k_Assembly_Contig_43_2 | 96 | 1650 |
| RFL 16 | Wheat-Rye-6R.300k_Assembly_Contig_11_2 | 97 | 1651 |
| RFL 16 | Anapurna.300k_Assembly_Contig_10_2 | 98 | 1652 |
| RFL 16 | R0932E.300k_Assembly_Contig_18_2 | 99 | 1653 |
| RFL 16 | R0934F.300k_Assembly_Contig_15_2 | 100 | 1654 |
| RFL 17 | Triticum- | 101 | 1655 |
| | timopheevii.300k_Assembly_Contig_7_1 | | |
| RFL 17 | R197.300k_Assembly_Contig_58_1 | 102 | 1656 |
| RFL 17 | Wheat-Rye-6R.300k_Assembly_Contig_59_1 | 103 | 1657 |
| RFL 17 | R0934F.300k_Assembly_Contig_51_1 | 104 | 1658 |
| RFL 17 | Triticum- | 105 | 1659 |
| | timopheevii.300k_Assembly_Contig_29_2 | | |
| RFL 18 | R0934F.300k_Assembly_Contig_25_2 | 106 | 1660 |
| RFL 18 | R0932E.300k_Assembly_Contig_21_2 | 107 | 1661 |
| RFL 18 | R197.300k_Assembly_Contig_14_2 | 108 | 1662 |
| RFL 18 | Anapurna.300k_Assembly_Contig_6_2 | 109 | 1663 |
| RFL 18 | Triticum- | 110 | 1664 |
| | timopheevii.300k_Assembly_Contig_16_3 | | |
| RFL 18 | Primepii.300k_Assembly_Contig_20_2 | 111 | 1665 |
| RFL 18 | Wheat-Rye-6R.300k_Assembly_Contig_8_2 | 112 | 1666 |
| RFL 19 | Anapurna.300k_Assembly_Contig_68_1 | 113 | 1667 |
| RFL 20 | Triticum- | 114 | 1668 |
| | timopheevii.300k_Assembly_Contig_47_1 | | |
| RFL 21 | R197.300k_Assembly_Contig_18_1 | 115 | 1669 |
| RFL 21 | Anapurna.300k_Assembly_Contig_16_1 | 116 | 1670 |
| RFL 21 | R0932E.300k_Assembly_Contig_58_1 | 117 | 1671 |
| RFL 21 | Wheat-Rye-6R.300k_Assembly_Contig_23_3 | 118 | 1672 |
| RFL 21 | Wheat-Rye-6R.300k_Assembly_Contig_23_2 | 119 | 1673 |
| RFL 21 | Primepii.300k_Assembly_Contig_42_2 | 120 | 1674 |
| RFL 21 | R0934F.300k_Assembly_Contig_28_3 | 121 | 1675 |
| RFL 21 | Primepii.300k_Assembly_Contig_42_3 | 122 | 1676 |
| RFL 21 | R0934F.300k_Assembly_Contig_28_2 | 123 | 1677 |
| RFL 22 | Primepii.300k_Assembly_Contig_63_1 | 124 | 1678 |
| RFL 22 | R0934F.300k_Assembly_Contig_61_1 | 125 | 1679 |
| RFL 23 | R0934F.300k_Assembly_Contig_46_2 | 126 | 1680 |
| RFL 23 | Wheat-Rye-6R.300k_Assembly_Contig_30_1 | 127 | 1681 |
| RFL 23 | R197.300k_Assembly_Contig_15_3 | 128 | 1682 |
| RFL 23 | R0932E.300k_Assembly_Contig_40_1 | 129 | 1683 |
| RFL 23 | R0934F.300k_Assembly_Contig_46_1 | 130 | 1684 |
| RFL 23 | R197.300k_Assembly_Contig_15_2 | 131 | 1685 |
| RFL 23 | Anapurna.300k_Assembly_Contig_42_1 | 132 | 1686 |
| RFL 23 | Primepii.300k_Assembly_Contig_14_2 | 133 | 1687 |
| RFL 24 | Anapurna.300k_Assembly_Contig_17_1 | 134 | 1688 |
| RFL 24 | R0934F.300k_Assembly_Contig_22_1 | 135 | 1689 |
| RFL 24 | R0932E.300k_Assembly_Contig_44_1 | 136 | 1690 |
| RFL 24 | Primepii.300k_Assembly_Contig_46_1 | 137 | 1691 |
| RFL 24 | R197.300k_Assembly_Contig_30_1 | 138 | 1692 |
| RFL 24 | Wheat-Rye-6R.300k_Assembly_Contig_40_1 | 139 | 1693 |
| RFL 25 | R197.300k_Assembly_Contig_92_2 | 140 | 1694 |
| RFL 25 | Wheat-Rye-6R.300k_Assembly_Contig_109_2 | 141 | 1695 |
| RFL 26 | Anapurna.300k_Assembly_Contig_38_1 | 142 | 1696 |
| RFL 26 | Wheat-Rye-6R.300k_Assembly_Contig_41_1 | 143 | 1697 |
| RFL 27 | Triticum- | 144 | 1698 |
| | timopheevii.300k_Assembly_Contig_63_3 | | |
| RFL 28 | R0932E.300k_Assembly_Contig_23_2 | 145 | 1699 |
| RFL 28 | R0932E.300k_Assembly_Contig_23_3 | 146 | 1700 |
| RFL 28 | Primepii.300k_Assembly_Contig_13_1 | 147 | 1701 |
| RFL 28 | R197.300k_Assembly_Contig_10_3 | 148 | 1702 |
| RFL 28 | R197.300k_Assembly_Contig_10_2 | 149 | 1703 |
| RFL 28 | R0934F.300k_Assembly_Contig_17_1 | 150 | 1704 |
| RFL 28 | Anapurna.300k_Assembly_Contig_2_3 | 151 | 1705 |
| RFL 28 | Wheat-Rye-6R.300k_Assembly_Contig_7_3 | 152 | 1706 |
| RFL 28 | Anapurna.300k_Assembly_Contig_2_2 | 153 | 1707 |
| RFL 28 | Wheat-Rye-6R.300k_Assembly_Contig_7_2 | 154 | 1708 |
| RFL 29 | Wheat-Rye-6R.300k_Assembly_Contig_77_2 | 155 | 1709 |
| RFL 29 | R0934F.300k_Assembly_Contig_78_1 | 156 | 1710 |
| RFL 29 | Wheat-Rye-6R.300k_Assembly_Contig_77_1 | 157 | 1711 |
| RFL 29 | Primepii.300k_Assembly_Contig_67_1 | 158 | 1712 |
| RFL 30 | Primepii.300k_Assembly_Contig_91_1 | 159 | 1713 |
| RFL 30 | R0934F.300k_Assembly_Contig_64_1 | 160 | 1714 |
| RFL 30 | R0932E.300k_Assembly_Contig_110_1 | 161 | 1715 |
| RFL 31 | Triticum- | 162 | 1716 |
| | timopheevii.300k_Assembly_Contig_14_1 | | |
| RFL 32 | Triticum- | 163 | 1717 |
| | timopheevii.300k_Assembly_Contig_6_2 | | |
| RFL 32 | Primepii.300k_Assembly_Contig_6_2 | 164 | 1718 |
| RFL 32 | R0934F.300k_Assembly_Contig_31_2 | 165 | 1719 |
| RFL 32 | R197.300k_Assembly_Contig_7_2 | 166 | 1720 |
| RFL 32 | Anapurna.300k_Assembly_Contig_31_2 | 167 | 1721 |
| RFL 32 | Wheat-Rye-6R.300k_Assembly_Contig_5_2 | 168 | 1722 |
| RFL 32 | R0932E.300k_Assembly_Contig_29_2 | 169 | 1723 |
| RFL 33 | Triticum- | 170 | 1724 |
| | timopheevii.300k_Assembly_Contig_8_1 | | |
| RFL 33 | Anapurna.300k_Assembly_Contig_5_2 | 171 | 1725 |
| RFL 33 | R197.300k_Assembly_Contig_6_3 | 172 | 1726 |
| RFL 33 | Wheat-Rye-6R.300k_Assembly_Contig_25_1 | 173 | 1727 |
| RFL 33 | R0932E.300k_Assembly_Contig_19_1 | 174 | 1728 |
| RFL 33 | Primepii.300k_Assembly_Contig_21_2 | 175 | 1729 |
| RFL 33 | R0934F.300k_Assembly_Contig_104_1 | 176 | 1730 |
| RFL 34 | R0932E.300k_Assembly_Contig_5_1 | 177 | 1731 |
| RFL 34 | R0932E.300k_Assembly_Contig_2_4 | 178 | 1732 |
| RFL 35 | Triticum- | 179 | 1733 |
| | timopheevii.300k_Assembly_Contig_21_2 | | |
| RFL 36 | Triticum- | 180 | 1734 |
| | timopheevii.300k_Assembly_Contig_20_2 | | |
| RFL 37 | Anapurna.300k_Assembly_Contig_37_2 | 181 | 1735 |
| RFL 37 | Wheat-Rye-6R.300k_Assembly_Contig_19_2 | 182 | 1736 |
| RFL 37 | R0932E.300k_Assembly_Contig_12_2 | 183 | 1737 |
| RFL 37 | R197.300k_Assembly_Contig_20_2 | 184 | 1738 |
| RFL 37 | R0934F.300k_Assembly_Contig_37_2 | 185 | 1739 |
| RFL 37 | Primepii.300k_Assembly_Contig_10_2 | 186 | 1740 |
| RFL 38 | Triticum- | 187 | 1741 |
| | timopheevii.300k_Assembly_Contig_43_2 | | |
| RFL 39 | R0932E.300k_Assembly_Contig_53_2 | 188 | 1742 |
| RFL 39 | Anapurna.300k_Assembly_Contig_29_2 | 189 | 1743 |
| RFL 39 | R0932E.300k_Assembly_Contig_22_1 | 190 | 1744 |
| RFL 39 | Wheat-Rye-6R.300k_Assembly_Contig_28_2 | 191 | 1745 |
| RFL 39 | Triticum- | 192 | 1746 |
| | timopheevii.300k_Assembly_Contig_25_2 | | |
| RFL 39 | Wheat-Rye-6R.300k_Assembly_Contig_15_1 | 193 | 1747 |
| RFL 39 | R0934F.300k_Assembly_Contig_27_1 | 194 | 1748 |
| RFL 39 | R0934F.300k_Assembly_Contig_26_2 | 195 | 1749 |
| RFL 39 | Primepii.300k_Assembly_Contig_40_2 | 196 | 1750 |
| RFL 39 | Primepii.300k_Assembly_Contig_30_1 | 197 | 1751 |
| RFL 39 | R197.300k_Assembly_Contig_36_2 | 198 | 1752 |
| RFL 39 | R197.300k_Assembly_Contig_27_1 | 199 | 1753 |
| RFL 39 | Anapurna.300k_Assembly_Contig_43_1 | 200 | 1754 |
| RFL 40 | R0934F.300k_Assembly_Contig_12_1 | 201 | 1755 |
| RFL 40 | Primepii.300k_Assembly_Contig_18_1 | 202 | 1756 |
| RFL 40 | Triticum- | 203 | 1757 |
| | timopheevii.300k_Assembly_Contig_5_1 | | |
| RFL 40 | R0932E.300k_Assembly_Contig_7_1 | 204 | 1758 |
| RFL 40 | Anapurna.300k_Assembly_Contig_20_1 | 205 | 1759 |
| RFL 40 | R197.300k_Assembly_Contig_32_1 | 206 | 1760 |
| RFL 41 | R0934F.300k_Assembly_Contig_24_2 | 207 | 1761 |
| RFL 41 | Wheat-Rye-6R.300k_Assembly_Contig_45_2 | 208 | 1762 |
| RFL 41 | Anapurna.300k_Assembly_Contig_39_2 | 209 | 1763 |
| RFL 41 | R0932E.300k_Assembly_Contig_56_2 | 210 | 1764 |
| RFL 41 | Primepii.300k_Assembly_Contig_47_2 | 211 | 1765 |
| RFL 41 | R197.300k_Assembly_Contig_40_2 | 212 | 1766 |
| RFL 42 | Triticum- | 213 | 1767 |
| | timopheevii.300k_Assembly_Contig_10_3 | | |
| RFL 43 | R0934F.300k_Assembly_Contig_8_1 | 214 | 1768 |
| RFL 43 | R0932E.300k_Assembly_Contig_13_1 | 215 | 1769 |
| RFL 43 | Triticum- | 216 | 1770 |
| | timopheevii.300k_Assembly_Contig_12_2 | | |
| RFL 43 | R197.300k_Assembly_Contig_22_1 | 217 | 1771 |
| RFL 43 | Primepii.300k_Assembly_Contig_31_1 | 218 | 1772 |
| RFL 43 | Anapurna.300k_Assembly_Contig_23_1 | 219 | 1773 |
| RFL 43 | Wheat-Rye-6R.300k_Assembly_Contig_10_1 | 220 | 1774 |
| RFL 44 | R0932E.300k_Assembly_Contig_32_1 | 221 | 1775 |
| RFL 44 | Primepii.300k_Assembly_Contig_7_1 | 222 | 1776 |
| RFL 44 | Anapurna.300k_Assembly_Contig_33_1 | 223 | 1777 |
| RFL 45 | R0932E.300k_Assembly_Contig_73_2 | 224 | 1778 |
| RFL 45 | R197.300k_Assembly_Contig_70_—2 | 225 | 1779 |
| RFL 45 | Wheat-Rye-6R.300k_Assembly_Contig_72_2 | 226 | 1780 |
| RFL 46 | Wheat-Rye-6R.300k_Assembly_Contig_35_1 | 227 | 1781 |
| RFL 47 | R0934F.300k_Assembly_Contig_57_2 | 228 | 1782 |
| RFL 47 | Wheat-Rye-6R.300k_Assembly_Contig_67_2 | 229 | 1783 |
| RFL 47 | Anapurna.300k_Assembly_Contig_85_2 | 230 | 1784 |
| RFL 47 | R0932E.300k_Assembly_Contig_71_2 | 231 | 1785 |
| RFL 47 | R197.300k_Assembly_Contig_62_2 | 232 | 1786 |
| RFL 47 | Primepii.300k_Assembly_Contig_86_3 | 233 | 1787 |
| RFL 48 | Primepii.300k_Assembly_Contig_51_1 | 234 | 1788 |
| RFL 48 | R197.300k_Assembly_Contig_57_1 | 235 | 1789 |
| RFL 48 | Anapurna.300k_Assembly_Contig_74_1 | 236 | 1790 |
| RFL 48 | R0934F.300k_Assembly_Contig_71_1 | 237 | 1791 |
| RFL 48 | R0932E.300k_Assembly_Contig_72_1 | 238 | 1792 |
| RFL 48 | Wheat-Rye-6R.300k_Assembly_Contig_82_1 | 239 | 1793 |
| RFL 49 | R197.300k_Assembly_Contig_83_1 | 240 | 1794 |
| RFL 49 | R197.300k_Assembly_Contig_95_2 | 241 | 1795 |
| RFL 49 | Triticum- | 242 | 1796 |
| | timopheevii.300k_Assembly_Contig_37_1 | | |
| RFL 49 | Triticum- | 243 | 1797 |
| | timopheevii.300k_Assembly_Contig_38_1 | | |
| RFL 50 | Anapurna.300k_Assembly_Contig_24_2 | 244 | 1798 |
| RFL 50 | Primepii.300k_Assembly_Contig_24_2 | 245 | 1799 |
| RFL 50 | R0932E.300k_Assembly_Contig_25_2 | 246 | 1800 |
| RFL 50 | R197.300k_Assembly_Contig_21_2 | 247 | 1801 |
| RFL 50 | Wheat-Rye-6R.300k_Assembly_Contig_22_2 | 248 | 1802 |
| RFL 50 | R0934F.300k_Assembly_Contig_39_2 | 249 | 1803 |
| RFL 51 | Anapurna.300k_Assembly_Contig_35_2 | 250 | 1804 |
| RFL 51 | R0934F.300k_Assembly_Contig_5_4 | 251 | 1805 |
| RFL 51 | Primepii.300k_Assembly_Contig_17_3 | 252 | 1806 |
| RFL 51 | Anapurna.300k_Assembly_Contig_109_1 | 253 | 1807 |
| RFL 51 | Primepii.300k_Assembly_Contig_19_2 | 254 | 1808 |
| RFL 51 | R0932E.300k_Assembly_Contig_55_1 | 255 | 1809 |
| RFL 51 | Wheat-Rye-6R.300k_Assembly_Contig_2_1 | 256 | 1810 |
| RFL 51 | R0934F.300k_Assembly_Contig_55_2 | 257 | 1811 |
| RFL 51 | Triticum- | 258 | 1812 |
| | timopheevii.300k_Assembly_Contig_4_2 | | |
| RFL 51 | R197.300k_Assembly_Contig_46_2 | 259 | 1813 |
| RFL 51 | Wheat-Rye-6R.300k_Assembly_Contig_37_2 | 260 | 1814 |
| RFL 51 | Anapurna.300k_Assembly_Contig_106_1 | 261 | 1815 |
| RFL 51 | R197.300k_Assembly_Contig_5_3 | 262 | 1816 |
| RFL 51 | R0932E.300k_Assembly_Contig_6_2 | 263 | 1817 |
| RFL 52 | R197.300k_Assembly_Contig_37_1 | 264 | 1818 |
| RFL 52 | R197.300k_Assembly_Contig_37_2 | 265 | 1819 |
| RFL 52 | R0932E.300k_Assembly_Contig_45_1 | 266 | 1820 |
| RFL 52 | Wheat-Rye-6R.300k_Assembly_Contig_39_1 | 267 | 1821 |
| RFL 52 | Wheat-Rye-6R.300k_Assembly_Contig_39_2 | 268 | 1822 |
| RFL 52 | Primepii.300k_Assembly_Contig_49_1 | 269 | 1823 |
| RFL 52 | Anapurna.300k_Assembly_Contig_22_1 | 270 | 1824 |
| RFL 52 | R0934F.300k_Assembly_Contig_49_1 | 271 | 1825 |
| RFL 52 | R0934F.300k_Assembly_Contig_49_2 | 272 | 1826 |
| RFL 52 | Triticum- | 273 | 1827 |
| | timopheevii.300k_Assembly_Contig_29_1 | | |
| RFL 53 | R0934F.300k_Assembly_Contig_75_2 | 274 | 1828 |
| RFL 53 | R0932E.300k_Assembly_Contig_64_2 | 275 | 1829 |
| RFL 53 | Anapurna.300k_Assembly_Contig_72_2 | 276 | 1830 |
| RFL 53 | Primepii.300k_Assembly_Contig_57_2 | 277 | 1831 |
| RFL 53 | Triticum- | 278 | 1832 |
| | timopheevii.300k_Assembly_Contig_55_3 | | |
| RFL 54 | Wheat-Rye-6R.300k_Assembly_Contig_80_1 | 279 | 1833 |
| RFL 54 | R0932E.300k_Assembly_Contig_209_1 | 280 | 1834 |
| RFL 54 | Anapurna.300k_Assembly_Contig_77_1 | 281 | 1835 |
| RFL 55 | R0932E.300k_Assembly_Contig_54_1 | 282 | 1836 |
| RFL 55 | R197.300k_Assembly_Contig_39_1 | 283 | 1837 |
| RFL 55 | R0934F.300k_Assembly_Contig_54_1 | 284 | 1838 |
| RFL 55 | Anapurna.300k_Assembly_Contig_41_1 | 285 | 1839 |
| RFL 55 | Primepii.300k_Assembly_Contig_44_1 | 286 | 1840 |
| RFL 55 | Wheat-Rye-6R.300k_Assembly_Contig_31_1 | 287 | 1841 |
| RFL 56 | R197.300k_Assembly_Contig_86_1 | 288 | 1842 |
| RFL 56 | R0932E.300k_Assembly_Contig_74_1 | 289 | 1843 |
| RFL 56 | Triticum- | 290 | 1844 |
| | timopheevii.300k_Assembly_Contig_39_1 | | |
| RFL 58 | Wheat-Rye-6R.300k_Assembly_Contig_66_1 | 291 | 1845 |
| RFL 58 | Anapurna.300k_Assembly_Contig_12_1 | 292 | 1846 |
| RFL 59 | Triticum- | 293 | 1847 |
| | timopheevii.300k_Assembly_Contig_60_1 | | |
| RFL 59 | R197.300k_Assembly_Contig_115_1 | 294 | 1848 |
| RFL 59 | R0932E.300k_Assembly_Contig_161_1 | 295 | 1849 |
| RFL 59 | R0932E.300k_Assembly_Contig_48_1 | 296 | 1850 |
| RFL 60 | Primepii.300k_Assembly_Contig_94_1 | 297 | 1851 |
| RFL 60 | R197.300k_Assembly_Contig_95_1 | 298 | 1852 |
| RFL 60 | R0934F.300k_Assembly_Contig_73_2 | 299 | 1853 |
| RFL 60 | Wheat-Rye-6R.300k_Assembly_Contig_48_2 | 300 | 1854 |
| RFL 61 | Triticum- | 301 | 1855 |
| | timopheevii.300k_Assembly_Contig_48_1 | | |
| RFL 62 | R0934F.300k_Assembly_Contig_138_1 | 302 | 1856 |
| RFL 63 | R197.300k_Assembly_Contig_84_1 | 303 | 1857 |
| RFL 63 | R197.300k_Assembly_Contig_84_2 | 304 | 1858 |
| RFL 63 | Triticum- | 305 | 1859 |
| | timopheevii.300k_Assembly_Contig_34_1 | | |
| RFL 64 | Primepii.300k_Assembly_Contig_50_1 | 306 | 1860 |
| RFL 64 | Wheat-Rye-6R.300k_Assembly_Contig_54_1 | 307 | 1861 |
| RFL 64 | R0934F.300k_Assembly_Contig_45_1 | 308 | 1862 |
| RFL 64 | Anapurna.300k_Assembly_Contig_61_1 | 309 | 1863 |
| RFL 64 | R197.300k_Assembly_Contig_42_1 | 310 | 1864 |
| RFL 64 | R0932E.300k_Assembly_Contig_59_1 | 311 | 1865 |
| RFL 65 | Triticum- | 312 | 1866 |
| | timopheevii.300k_Assembly_Contig_42_2 | | |
| RFL 66 | Triticum- | 313 | 1867 |
| | timopheevii.300k_Assembly_Contig_27_1 | | |
| RFL 66 | Triticum- | 314 | 1868 |
| | timopheevii.300k_Assembly_Contig_80_1 | | |
| RFL 67 | Primepii.300k_Assembly_Contig_213_1 | 315 | 1869 |
| RFL 67 | Primepii.300k_Assembly_Contig_80_2 | 316 | 1870 |
| RFL 67 | Primepii.300k_Assembly_Contig_80_1 | 317 | 1871 |
| RFL 67 | R0934F.300k_Assembly_Contig_111_2 | 318 | 1872 |
| RFL 67 | Primepii.300k_Assembly_Contig_2_1 | 319 | 1873 |
| RFL 67 | R0934F.300k_Assembly_Contig_111_1 | 320 | 1874 |
| RFL 67 | R0934F.300k_Assembly_Contig_4_1 | 321 | 1875 |
| RFL 68 | Wheat-Rye-6R.300k_Assembly_Contig_53_1 | 322 | 1876 |
| RFL 68 | R0932E.300k_Assembly_Contig_68_1 | 323 | 1877 |
| RFL 68 | Wheat-Rye-6R.300k_Assembly_Contig_53_3 | 324 | 1878 |
| RFL 68 | R197.300k_Assembly_Contig_19_1 | 325 | 1879 |
| RFL 68 | R0934F.300k_Assembly_Contig_66_1 | 326 | 1880 |
| RFL 68 | Triticum- | 327 | 1881 |
| | timopheevii.300k_Assembly_Contig_33_1 | | |
| RFL 68 | Anapurna.300k_Assembly_Contig_71_1 | 328 | 1882 |
| RFL 68 | Anapurna.300k_Assembly_Contig_71_2 | 329 | 1883 |
| RFL 68 | Primepii.300k_Assembly_Contig_37_1 | 330 | 1884 |
| RFL 68 | R0932E.300k_Assembly_Contig_68_3 | 331 | 1885 |
| RFL 68 | R197.300k_Assembly_Contig_19_3 | 332 | 1886 |
| RFL 69 | Triticum- | 333 | 1887 |
| | timopheevii.300k_Assembly_Contig_45_1 | | |
| RFL 70 | R0934F.300k_Assembly_Contig_68_1 | 334 | 1888 |
| RFL 70 | R197.300k_Assembly_Contig_65_1 | 335 | 1889 |
| RFL 70 | R0932E.300k_Assembly_Contig_94_1 | 336 | 1890 |
| RFL 70 | Primepii.300k_Assembly_Contig_55_1 | 337 | 1891 |
| RFL 70 | Anapurna.300k_Assembly_Contig_111_1 | 338 | 1892 |
| RFL 70 | Wheat-Rye-6R.300k_Assembly_Contig_74_1 | 339 | 1893 |
| RFL 70 | Anapurna.300k_Assembly_Contig_98_1 | 340 | 1894 |
| RFL 71 | R0932E.300k_Assembly_Contig_114_1 | 341 | 1895 |
| RFL 72 | R0932E.300k_Assembly_Contig_98_1 | 342 | 1896 |
| RFL 73 | R0932E.300k_Assembly_Contig_89_2 | 343 | 1897 |
| RFL 73 | R197.300k_Assembly_Contig_78_2 | 344 | 1898 |
| RFL 73 | Triticum- | 345 | 1899 |
| | timopheevii.300k_Assembly_Contig_31_2 | | |
| RFL 74 | R197.300k_Assembly_Contig_194_1 | 346 | 1900 |
| RFL 74 | R0934F.300k_Assembly_Contig_36_2 | 347 | 1901 |
| RFL 74 | R0934F.300k_Assembly_Contig_150_2 | 348 | 1902 |
| RFL 74 | R0932E.300k_Assembly_Contig_185_1 | 349 | 1903 |
| RFL 74 | R0932E.300k_Assembly_Contig_201_1 | 350 | 1904 |
| RFL 74 | R0932E.300k_Assembly_Contig_92_1 | 351 | 1905 |
| RFL 74 | R197.300k_Assembly_Contig_179_1 | 352 | 1906 |
| RFL 74 | R0932E.300k_Assembly_Contig_83_1 | 353 | 1907 |
| RFL 74 | R197.300k_Assembly_Contig_4_1 | 354 | 1908 |
| RFL 74 | R0934F.300k_Assembly_Contig_126_1 | 355 | 1909 |
| RFL 75 | R0932E.300k_Assembly_Contig_88_1 | 356 | 1910 |
| RFL 77 | R0932E.300k_Assembly_Contig_214_2 | 357 | 1911 |
| RFL 78 | R0932E.300k_Assembly_Contig_112_1 | 358 | 1912 |
| RFL 79 | R0932E.300k_Assembly_Contig_103_1 | 359 | 1913 |
| RFL 79 | R0934F.300k_Assembly_Contig_80_1 | 360 | 1914 |
| RFL 79 | R197.300k_Assembly_Contig_120_1 | 361 | 1915 |
| RFL 79 | Triticum- | 362 | 1916 |
| | timopheevii.300k_Assembly_Contig_57_1 | | |
| RFL 80 | R197.300k_Assembly_Contig_59_1 | 363 | 1917 |
| RFL 81 | R0932E.300k_Assembly_Contig_4_1 | 364 | 1918 |
| RFL 81 | R0932E.300k_Assembly_Contig_199_1 | 365 | 1919 |
| RFL 82 | Triticum- | 366 | 1920 |
| | timopheevii.300k_Assembly_Contig_64_2 | | |
| RFL 82 | R0932E.300k_Assembly_Contig_123_2 | 367 | 1921 |
| RFL 83 | Primepii.300k_Assembly_Contig_52_1 | 368 | 1922 |
| RFL 83 | R0934F.300k_Assembly_Contig_43_1 | 369 | 1923 |
| RFL 83 | R0932E.300k_Assembly_Contig_46_1 | 370 | 1924 |
| RFL 83 | Anapurna.300k_Assembly_Contig_62_1 | 371 | 1925 |
| RFL 83 | R197.300k_Assembly_Contig_54_1 | 372 | 1926 |
| RFL 83 | Wheat-Rye-6R.300k_Assembly_Contig_60_1 | 373 | 1927 |
| RFL 84 | R0932E.300k_Assembly_Contig_116_1 | 374 | 1928 |
| RFL 85 | R197.300k_Assembly_Contig_80_3 | 375 | 1929 |
| RFL 85 | Triticum- | 376 | 1930 |
| | timopheevii.300k_Assembly_Contig_36_3 | | |
| RFL 85 | R197.300k_Assembly_Contig_80_2 | 377 | 1931 |
| RFL 87 | Wheat-Rye-6R.300k_Assembly_Contig_73_1 | 378 | 1932 |
| RFL 89 | Primepii.300k_Assembly_Contig_83_1 | 379 | 1933 |
| RFL 89 | Primepii.300k_Assembly_Contig_183_1 | 380 | 1934 |
| RFL 89 | R0934F.300k_Assembly_Contig_99_1 | 381 | 1935 |
| RFL 90 | Primepii.300k_Assembly_Contig_82_2 | 382 | 1936 |
| RFL 90 | Wheat-Rye-6R.300k_Assembly_Contig_65_2 | 383 | 1937 |
| RFL 90 | R0934F.300k_Assembly_Contig_63_1 | 384 | 1938 |
| RFL 90 | R197.300k_Assembly_Contig_66_2 | 385 | 1939 |
| RFL 90 | Anapurna.300k_Assembly_Contig_51_1 | 386 | 1940 |
| RFL 90 | R0932E.300k_Assembly_Contig_90_1 | 387 | 1941 |
| RFL 92 | Wheat-Rye-6R.300k_Assembly_Contig_55_2 | 388 | 1942 |
| RFL 92 | R197.300k_Assembly_Contig_47_2 | 389 | 1943 |
| RFL 92 | Triticum- | 390 | 1944 |
| | timopheevii.300k_Assembly_Contig_30_2 | | |
| RFL 92 | R0932E.300k_Assembly_Contig_43_2 | 391 | 1945 |
| RFL 92 | Triticum- | 392 | 1946 |
| | timopheevii.300k_Assembly_Contig_30_3 | | |
| RFL 92 | Anapurna.300k_Assembly_Contig_50_2 | 393 | 1947 |
| RFL 92 | R0934F.300k_Assembly_Contig_48_2 | 394 | 1948 |
| RFL 92 | Primepii.300k_Assembly_Contig_53_2 | 395 | 1949 |
| RFL 93 | R197.300k_Assembly_Contig_117_1 | 396 | 1950 |
| RFL 93 | R0932E.300k_Assembly_Contig_113_1 | 397 | 1951 |
| RFL 94 | Wheat-Rye-6R.300k_Assembly_Contig_41_2 | 398 | 1952 |
| RFL 94 | Anapurna.300k_Assembly_Contig_38_2 | 399 | 1953 |
| RFL 94 | R197.300k_Assembly_Contig_24_1 | 400 | 1954 |
| RFL 94 | R0934F.300k_Assembly_Contig_32_1 | 401 | 1955 |
| RFL 94 | R0932E.300k_Assembly_Contig_17_1 | 402 | 1956 |
| RFL 94 | Primepii.300k_Assembly_Contig_41_2 | 403 | 1957 |
| RFL 95 | Triticum- | 404 | 1958 |
| | timopheevii.300k_Assembly_Contig_51_1 | | |
| RFL 96 | Primepii.300k_Assembly_Contig_72_1 | 405 | 1959 |
| RFL 97 | Anapurna.300k_Assembly_Contig_92_2 | 406 | 1960 |
| RFL 97 | Anapurna.300k_Assembly_Contig_19_1 | 407 | 1961 |
| RFL 97 | Wheat-Rye-6R.300k_Assembly_Contig_103_2 | 408 | 1962 |
| RFL 97 | Wheat-Rye-6R.300k_Assembly_Contig_63_1 | 409 | 1963 |
| RFL 98 | R0932E.300k_Assembly_Contig_79_1 | 410 | 1964 |
| RFL 98 | Primepii.300k_Assembly_Contig_70_1 | 411 | 1965 |
| RFL 98 | R0934F.300k_Assembly_Contig_70_1 | 412 | 1966 |
| RFL 98 | R197.300k_Assembly_Contig_63_1 | 413 | 1967 |
| RFL 98 | Wheat-Rye-6R.300k_Assembly_Contig_71_1 | 414 | 1968 |
| RFL 99 | R0932E.300k_Assembly_Contig_15_2 | 415 | 1969 |
| RFL 99 | R0932E.300k_Assembly_Contig_153_2 | 416 | 1970 |
| RFL 100 | R197.300k_Assembly_Contig_94_1 | 417 | 1971 |
| RFL 100 | Wheat-Rye-6R.300k_Assembly_Contig_113_1 | 418 | 1972 |
| RFL 100 | R0932E.300k_Assembly_Contig_100_1 | 419 | 1973 |
| RFL 100 | Anapurna.300k_Assembly_Contig_113_1 | 420 | 1974 |
| RFL 101 | Anapurna.300k_Assembly_Contig_59_1 | 421 | 1975 |
| RFL 101 | Triticum- | 422 | 1976 |
| | timopheevii.300k_Assembly_Contig_54_1 | | |
| RFL 102 | Triticum- | 423 | 1977 |
| | timopheevii.300k_Assembly_Contig_71_1 | | |
| RFL 103 | Primepii.300k_Assembly_Contig_106_1 | 424 | 1978 |
| RFL 103 | Wheat-Rye-6R.300k_Assembly_Contig_98_1 | 425 | 1979 |
| RFL 103 | R197.300k_Assembly_Contig_79_1 | 426 | 1980 |
| RFL 104 | R0934F.300k_Assembly_Contig_69_1 | 427 | 1981 |
| RFL 104 | Triticum- | 428 | 1982 |
| | timopheevii.300k_Assembly_Contig_35_1 | | |
| RFL 104 | R0932E.300k_Assembly_Contig_82_1 | 429 | 1983 |
| RFL 104 | R197.300k_Assembly_Contig_72_1 | 430 | 1984 |
| RFL 105 | Primepii.300k_Assembly_Contig_85_1 | 431 | 1985 |
| RFL 106 | Wheat-Rye-6R.300k_Assembly_Contig_87_2 | 432 | 1986 |
| RFL 106 | Primepii.300k_Assembly_Contig_81_2 | 433 | 1987 |
| RFL 106 | Anapurna.300k_Assembly_Contig_80_1 | 434 | 1988 |
| RFL 106 | R0932E.300k_Assembly_Contig_76_1 | 435 | 1989 |
| RFL 106 | R197.300k_Assembly_Contig_67_1 | 436 | 1990 |
| RFL 106 | R0934F.300k_Assembly_Contig_103_2 | 437 | 1991 |
| RFL 107 | R0934F.300k_Assembly_Contig_117_1 | 438 | 1992 |
| RFL 107 | Triticum- | 439 | 1993 |
| | timopheevii.300k_Assembly_Contig_69_1 | | |
| RFL 108 | Wheat-Rye-6R.300k_Assembly_Contig_86_1 | 440 | 1994 |
| RFL 108 | R0932E.300k_Assembly_Contig_87_1 | 441 | 1995 |
| RFL 108 | R197.300k_Assembly_Contig_77_1 | 442 | 1996 |
| RFL 108 | Anapurna.300k_Assembly_Contig_78_1 | 443 | 1997 |
| RFL 108 | R0934F.300k_Assembly_Contig_115_1 | 444 | 1998 |
| RFL 109 | Triticum- | 445 | 1999 |
| | timopheevii.300k_Assembly_Contig_78_2 | | |
| RFL 110 | Triticum- | 446 | 2000 |
| | timopheevii.300k_Assembly_Contig_15_2 | | |
| RFL 111 | R0932E.300k_Assembly_Contig_78_1 | 447 | 2001 |
| RFL 111 | R0934F.300k_Assembly_Contig_23_1 | 448 | 2002 |
| RFL 111 | Anapurna.300k_Assembly_Contig_58_1 | 449 | 2003 |
| RFL 111 | R197.300k_Assembly_Contig_69_1 | 450 | 2004 |
| RFL 111 | Primepii.300k_Assembly_Contig_35_1 | 451 | 2005 |
| RFL 111 | Wheat-Rye-6R.300k_Assembly_Contig_83_1 | 452 | 2006 |
| RFL 112 | R0932E.300k_Assembly_Contig_20_1 | 453 | 2007 |
| RFL 112 | R197.300k_Assembly_Contig_17_1 | 454 | 2008 |
| RFL 112 | Wheat-Rye-6R.300k_Assembly_Contig_17_1 | 455 | 2009 |
| RFL 112 | Anapurna.300k_Assembly_Contig_4_1 | 456 | 2010 |
| RFL 112 | Primepii.300k_Assembly_Contig_12_1 | 457 | 2011 |
| RFL 112 | R0934F.300k_Assembly_Contig_6_1 | 458 | 2012 |
| RFL 113 | R0932E.300k_Assembly_Contig_216_1 | 459 | 2013 |
| RFL 113 | R0934F.300k_Assembly_Contig_202_1 | 460 | 2014 |
| RFL 113 | Primepii.300k_Assembly_Contig_92_1 | 461 | 2015 |
| RFL 113 | R197.300k_Assembly_Contig_98_1 | 462 | 2016 |
| RFL 114 | R0932E.300k_Assembly_Contig_86_1 | 463 | 2017 |
| RFL 115 | R0934F.300k_Assembly_Contig_128_1 | 464 | 2018 |
| RFL 115 | Triticum- | 465 | 2019 |
| | timopheevii.300k_Assembly_Contig_74_1 | | |
| RFL 116 | Triticum- | 466 | 2020 |
| | timopheevii.300k_Assembly_Contig_44_2 | | |
| RFL 118 | R197.300k_Assembly_Contig_75_1 | 467 | 2021 |
| RFL 118 | Wheat-Rye-6R.300k_Assembly_Contig_93_1 | 468 | 2022 |
| RFL 118 | Anapurna.300k_Assembly_Contig_87_1 | 469 | 2023 |
| RFL 119 | R197.300k_Assembly_Contig_1_1 | 470 | 2024 |
| RFL 119 | Wheat-Rye-6R.300k_Assembly_Contig_1_1 | 471 | 2025 |
| RFL 119 | Wheat-Rye-6R.300k_Assembly_Contig_194_1 | 472 | 2026 |
| RFL 119 | R0934F.300k_Assembly_Contig_2_1 | 473 | 2027 |
| RFL 119 | Primepii.300k_Assembly_Contig_1_1 | 474 | 2028 |
| RFL 119 | Anapurna.300k_Assembly_Contig_1_1 | 475 | 2029 |
| RFL 119 | R0932E.300k_Assembly_Contig_1_1 | 476 | 2030 |
| RFL 120 | Triticum- | 477 | 2031 |
| | timopheevii.300k_Assembly_Contig_67_1 | | |
| RFL 121 | R197.300k_Assembly_Contig_96_1 | 478 | 2032 |
| RFL 121 | R0932E.300k_Assembly_Contig_93_1 | 479 | 2033 |
| RFL 121 | Triticum- | 480 | 2034 |
| | timopheevii.300k_Assembly_Contig_70_1 | | |
| RFL 121 | R0934F.300k_Assembly_Contig_102_1 | 481 | 2035 |
| RFL 121 | Wheat-Rye-6R.300k_Assembly_Contig_95_1 | 482 | 2036 |
| RFL 122 | Primepii.300k_Assembly_Contig_90_1 | 483 | 2037 |
| RFL 122 | R197.300k_Assembly_Contig_68_1 | 484 | 2038 |
| RFL 122 | Anapurna.300k_Assembly_Contig_63_1 | 485 | 2039 |
| RFL 122 | R0932E.300k_Assembly_Contig_91_1 | 486 | 2040 |
| RFL 122 | R0934F.300k_Assembly_Contig_97_1 | 487 | 2041 |
| RFL 122 | Triticum- | 488 | 2042 |
| | timopheevii.300k_Assembly_Contig_59_1 | | |
| RFL 122 | Wheat-Rye-6R.300k_Assembly_Contig_85_1 | 489 | 2043 |
| RFL 123 | Triticum- | 490 | 2044 |
| | timopheevii.300k_Assembly_Contig_65_1 | | |
| RFL 124 | Primepii.300k_Assembly_Contig_96_1 | 491 | 2045 |
| RFL 124 | R197.300k_Assembly_Contig_116_1 | 492 | 2046 |
| RFL 124 | R0934F.300k_Assembly_Contig_110_1 | 493 | 2047 |
| RFL 124 | Wheat-Rye-6R.300k_Assembly_Contig_92_1 | 494 | 2048 |
| RFL 124 | Anapurna.300k_Assembly_Contig_84_1 | 495 | 2049 |
| RFL 124 | R0932E.300k_Assembly_Contig_107_1 | 496 | 2050 |
| RFL 125 | Triticum- | 497 | 2051 |
| | timopheevii.300k_Assembly_Contig_40_1 | | |
| RFL 125 | Triticum- | 498 | 2052 |
| | timopheevii.300k_Assembly_Contig_41_3 | | |
| RFL 125 | R197.300k_Assembly_Contig_3_1 | 499 | 2053 |
| RFL 126 | R0932E.300k_Assembly_Contig_35_1 | 500 | 2054 |
| RFL 126 | R197.300k_Assembly_Contig_9_3 | 501 | 2055 |
| RFL 126 | R0932E.300k_Assembly_Contig_35_2 | 502 | 2056 |
| RFL 126 | Anapurna.300k_Assembly_Contig_18_3 | 503 | 2057 |
| RFL 126 | Primepii.300k_Assembly_Contig_5_3 | 504 | 2058 |
| RFL 126 | Wheat-Rye-6R.300k_Assembly_Contig_29_1 | 505 | 2059 |
| RFL 126 | R0934F.300k_Assembly_Contig_19_3 | 506 | 2060 |
| RFL 126 | Wheat-Rye-6R.300k_Assembly_Contig_14_3 | 507 | 2061 |
| RFL 126 | Triticum- | 508 | 2062 |
| | timopheevii.300k_Assembly_Contig_24_1 | | |
| RFL 126 | Primepii.300k_Assembly_Contig_43_1 | 509 | 2063 |
| RFL 126 | R0934F.300k_Assembly_Contig_30_2 | 510 | 2064 |
| RFL 126 | R0934F.300k_Assembly_Contig_30_1 | 511 | 2065 |
| RFL 126 | R197.300k_Assembly_Contig_16_1 | 512 | 2066 |
| RFL 126 | R0932E.300k_Assembly_Contig_16_3 | 513 | 2067 |
| RFL 126 | Anapurna.300k_Assembly_Contig_11_1 | 514 | 2068 |
| RFL 127 | Anapurna.300k_Assembly_Contig_73_1 | 515 | 2069 |
| RFL 128 | R197.300k_Assembly_Contig_113_2 | 516 | 2070 |
| RFL 129 | R0932E.300k_Assembly_Contig_104_1 | 517 | 2071 |
| RFL 129 | R0934F.300k_Assembly_Contig_91_1 | 518 | 2072 |
| RFL 129 | R197.300k_Assembly_Contig_101_1 | 519 | 2073 |
| RFL 130 | Triticum- | 520 | 2074 |
| | timopheevii.300k_Assembly_Contig_53_2 | | |
| RFL 131 | R0934F.300k_Assembly_Contig_106_1 | 521 | 2075 |
| RFL 131 | Anapurna.300k_Assembly_Contig_94_1 | 522 | 2076 |
| RFL 131 | Primepii.300k_Assembly_Contig_112_1 | 523 | 2077 |
| RFL 132 | R197.300k_Assembly_Contig_82_1 | 524 | 2078 |
| RFL 132 | Wheat-Rye-6R.300k_Assembly_Contig_96_1 | 525 | 2079 |
| RFL 132 | Primepii.300k_Assembly_Contig_87_1 | 526 | 2080 |
| RFL 133 | R0932E.300k_Assembly_Contig_28_2 | 527 | 2081 |
| RFL 133 | Anapurna.300k_Assembly_Contig_7_2 | 528 | 2082 |
| RFL 133 | Primepii.300k_Assembly_Contig_26_2 | 529 | 2083 |
| RFL 134 | Wheat-Rye-6R.300k_Assembly_Contig_106_1 | 530 | 2084 |
| RFL 134 | R197.300k_Assembly_Contig_100_1 | 531 | 2085 |
| RFL 134 | Primepii.300k_Assembly_Contig_102_1 | 532 | 2086 |
| RFL 135 | Triticum- | 533 | 2087 |
| | timopheevii.300k_Assembly_Contig_93_1 | | |
| RFL 136 | Primepii.300k_Assembly_Contig_73_1 | 534 | 2088 |
| RFL 136 | R0934F.300k_Assembly_Contig_77_1 | 535 | 2089 |
| RFL 136 | R0932E.300k_Assembly_Contig_65_1 | 536 | 2090 |
| RFL 136 | Anapurna.300k_Assembly_Contig_52_1 | 537 | 2091 |
| RFL 136 | Wheat-Rye-6R.300k_Assembly_Contig_84_1 | 538 | 2092 |
| RFL 136 | R197.300k_Assembly_Contig_81_1 | 539 | 2093 |
| RFL 137 | R0934F.300k_Assembly_Contig_21_3 | 540 | 2094 |
| RFL 137 | R0932E.300k_Assembly_Contig_10_3 | 541 | 2095 |
| RFL 137 | Primepii.300k_Assembly_Contig_48_3 | 542 | 2096 |
| RFL 137 | Anapurna.300k_Assembly_Contig_9_3 | 543 | 2097 |
| RFL 137 | Wheat-Rye-6R.300k_Assembly_Contig_20_3 | 544 | 2098 |
| RFL 137 | R197.300k_Assembly_Contig_2_3 | 545 | 2099 |
| RFL 138 | R0934F.300k_Assembly_Contig_201_1 | 546 | 2100 |
| RFL 138 | Triticum- | 547 | 2101 |
| | timopheevii.300k_Assembly_Contig_1_1 | | |
| RFL 138 | R0934F.300k_Assembly_Contig_1_1 | 548 | 2102 |
| RFL 139 | R0934F.300k_Assembly_Contig_74_2 | 549 | 2103 |
| RFL 139 | Primepii.300k_Assembly_Contig_79_2 | 550 | 2104 |
| RFL 139 | Wheat-Rye-6R.300k_Assembly_Contig_70_2 | 551 | 2105 |
| RFL 139 | Anapurna.300k_Assembly_Contig_64_2 | 552 | 2106 |
| RFL 140 | Primepii.300k_Assembly_Contig_105_2 | 553 | 2107 |
| RFL 140 | R0934F.300k_Assembly_Contig_56_2 | 554 | 2108 |
| RFL 141 | R0932E.300k_Assembly_Contig_75_1 | 555 | 2109 |
| RFL 141 | R0934F.300k_Assembly_Contig_50_1 | 556 | 2110 |
| RFL 142 | R0934F.300k_Assembly_Contig_76_1 | 557 | 2111 |
| RFL 142 | Primepii.300k_Assembly_Contig_75_1 | 558 | 2112 |
| RFL 143 | Wheat-Rye-6R.300k_Assembly_Contig_3_1 | 559 | 2113 |
| RFL 143 | R0934F.300k_Assembly_Contig_9_1 | 560 | 2114 |
| RFL 143 | Primepii.300k_Assembly_Contig_3_1 | 561 | 2115 |
| RFL 143 | R197.300k_Assembly_Contig_8_1 | 562 | 2116 |
| RFL 143 | R0932E.300k_Assembly_Contig_3_1 | 563 | 2117 |
| RFL 143 | Anapurna.300k_Assembly_Contig_3_1 | 564 | 2118 |
| RFL 144 | Anapurna.300k_Assembly_Contig_49_1 | 565 | 2119 |
| RFL 144 | Wheat-Rye-6R.300k_Assembly_Contig_58_1 | 566 | 2120 |
| RFL 144 | R197.300k_Assembly_Contig_56_1 | 567 | 2121 |
| RFL 144 | R0934F.300k_Assembly_Contig_40_1 | 568 | 2122 |
| RFL 144 | Primepii.300k_Assembly_Contig_58_1 | 569 | 2123 |
| RFL 144 | R0932E.300k_Assembly_Contig_50_1 | 570 | 2124 |
| RFL 145 | R0932E.300k_Assembly_Contig_62_1 | 571 | 2125 |
| RFL 145 | R0934F.300k_Assembly_Contig_52_1 | 572 | 2126 |
| RFL 145 | Anapurna.300k_Assembly_Contig_53_1 | 573 | 2127 |
| RFL 145 | Primepii.300k_Assembly_Contig_34_2 | 574 | 2128 |
| RFL 145 | R197.300k_Assembly_Contig_44_2 | 575 | 2129 |
| RFL 145 | Wheat-Rye-6R.300k_Assembly_Contig_36_2 | 576 | 2130 |
| RFL 146 | Anapurna.300k_Assembly_Contig_46_3 | 577 | 2131 |
| RFL 146 | R197.300k_Assembly_Contig_147_3 | 578 | 2132 |
| RFL 146 | Wheat-Rye-6R.300k_Assembly_Contig_18_3 | 579 | 2133 |
| RFL 146 | R0932E.300k_Assembly_Contig_42_3 | 580 | 2134 |
| RFL 147 | Anapurna.300k_Assembly_Contig_36_4 | 581 | 2135 |
| RFL 147 | R0934F.300k_Assembly_Contig_35_3 | 582 | 2136 |
| RFL 147 | Anapurna.300k_Assembly_Contig_36_3 | 583 | 2137 |
| RFL 147 | Wheat-Rye-6R.300k_Assembly_Contig_43_3 | 584 | 2138 |
| RFL 147 | R0932E.300k_Assembly_Contig_49_3 | 585 | 2139 |
| RFL 147 | R197.300k_Assembly_Contig_2_6 | 586 | 2140 |
| RFL 147 | Primepii.300k_Assembly_Contig_32_3 | 587 | 2141 |
| RFL 148 | R197.300k_Assembly_Contig_28_2 | 588 | 2142 |
| RFL 148 | R0934F.300k_Assembly_Contig_13_2 | 589 | 2143 |
| RFL 148 | Primepii.300k_Assembly_Contig_4_2 | 590 | 2144 |
| RFL 148 | R0932E.300k_Assembly_Contig_218_1 | 591 | 2145 |
| RFL 149 | Triticum- | 592 | 2146 |
| | timopheevii.300k_Assembly_Contig_18_2 | | |
| RFL 150 | Triticum- | 593 | 2147 |
| | timopheevii.300k_Assembly_Contig_66_3 | | |
| RFL 151 | R0934F.300k_Assembly_Contig_215_1 | 594 | 2148 |
| RFL 151 | Primepii.300k_Assembly_Contig_119_1 | 595 | 2149 |
| RFL 151 | R197.300k_Assembly_Contig_114_1 | 596 | 2150 |
| RFL 152 | Triticum- | 597 | 2151 |
| | timopheevii.300k_Assembly_Contig_114_1 | | |
| RFL 152 | R0934F.300k_Assembly_Contig_177_1 | 598 | 2152 |
| RFL 153 | R0932E.300k_Assembly_Contig_121_1 | 599 | 2153 |
| RFL 153 | Anapurna.300k_Assembly_Contig_124_1 | 600 | 2154 |
| RFL 153 | Primepii.300k_Assembly_Contig_126_1 | 601 | 2155 |
| RFL 153 | R0934F.300k_Assembly_Contig_206_1 | 602 | 2156 |
| RFL 153 | R0934F.300k_Assembly_Contig_147_1 | 603 | 2157 |
| RFL 154 | R0934F.300k_Assembly_Contig_174_1 | 604 | 2158 |
| RFL 154 | Primepii.300k_Assembly_Contig_143_1 | 605 | 2159 |
| RFL 154 | Primepii.300k_Assembly_Contig_120_1 | 606 | 2160 |
| RFL 154 | R0934F.300k_Assembly_Contig_134_1 | 607 | 2161 |
| RFL 154 | Primepii.300k_Assembly_Contig_125_1 | 608 | 2162 |
| RFL 154 | Wheat-Rye-6R.300k_Assembly_Contig_42_1 | 609 | 2163 |
| RFL 154 | R0934F.300k_Assembly_Contig_139_1 | 610 | 2164 |
| RFL 154 | R197.300k_Assembly_Contig_123_1 | 611 | 2165 |
| RFL 154 | R0932E.300k_Assembly_Contig_168_1 | 612 | 2166 |
| RFL 154 | R0932E.300k_Assembly_Contig_37_1 | 613 | 2167 |
| RFL 154 | Anapurna.300k_Assembly_Contig_135_1 | 614 | 2168 |
| RFL 154 | R197.300k_Assembly_Contig_140_1 | 615 | 2169 |
| RFL 154 | R197.300k_Assembly_Contig_161_1 | 616 | 2170 |
| RFL 154 | Anapurna.300k_Assembly_Contig_112_1 | 617 | 2171 |
| RFL 154 | Wheat-Rye-6R.300k_Assembly_Contig_160_1 | 618 | 2172 |
| RFL 154 | R0934F.300k_Assembly_Contig_182_1 | 619 | 2173 |
| RFL 154 | R0934F.300k_Assembly_Contig_200_1 | 620 | 2174 |
| RFL 154 | Wheat-Rye-6R.300k_Assembly_Contig_105_1 | 621 | 2175 |
| RFL 154 | Primepii.300k_Assembly_Contig_176_1 | 622 | 2176 |
| RFL 154 | R0934F.300k_Assembly_Contig_165_1 | 623 | 2177 |
| RFL 154 | Wheat-Rye-6R.300k_Assembly_Contig_200_1 | 624 | 2178 |
| RFL 154 | R197.300k_Assembly_Contig_13_1 | 625 | 2179 |
| RFL 154 | R197.300k_Assembly_Contig_158_1 | 626 | 2180 |
| RFL 154 | Primepii.300k_Assembly_Contig_160_1 | 627 | 2181 |
| RFL 154 | R0932E.300k_Assembly_Contig_156_1 | 628 | 2182 |
| RFL 154 | R0932E.300k_Assembly_Contig_179_1 | 629 | 2183 |
| RFL 154 | Anapurna.300k_Assembly_Contig_128_1 | 630 | 2184 |
| RFL 154 | Anapurna.300k_Assembly_Contig_104_1 | 631 | 2185 |
| RFL 154 | R0932E.300k_Assembly_Contig_177_1 | 632 | 2186 |
| RFL 155 | R197.300k_Assembly_Contig_127_1 | 633 | 2187 |
| RFL 155 | R0934F.300k_Assembly_Contig_109_1 | 634 | 2188 |
| RFL 155 | Wheat-Rye-6R.300k_Assembly_Contig_121_1 | 635 | 2189 |
| RFL 155 | Anapurna.300k_Assembly_Contig_108_1 | 636 | 2190 |
| RFL 155 | R0932E.300k_Assembly_Contig_122_1 | 637 | 2191 |
| RFL 155 | Primepii.300k_Assembly_Contig_110_1 | 638 | 2192 |
| RFL 156 | Wheat-Rye-6R.300k_Assembly_Contig_130_1 | 639 | 2193 |
| RFL 156 | Anapurna.300k_Assembly_Contig_117_2 | 640 | 2194 |
| RFL 156 | R0934F.300k_Assembly_Contig_176_1 | 641 | 2195 |
| RFL 156 | Anapurna.300k_Assembly_Contig_171_1 | 642 | 2196 |
| RFL 156 | R0932E.300k_Assembly_Contig_154_2 | 643 | 2197 |
| RFL 156 | Primepii.300k_Assembly_Contig_134_2 | 644 | 2198 |
| RFL 157 | Primepii.300k_Assembly_Contig_108_1 | 645 | 2199 |
| RFL 157 | R197.300k_Assembly_Contig_97_1 | 646 | 2200 |
| RFL 157 | Wheat-Rye-6R.300k_Assembly_Contig_117_1 | 647 | 2201 |
| RFL 157 | Anapurna.300k_Assembly_Contig_105_1 | 648 | 2202 |
| RFL 157 | R0932E.300k_Assembly_Contig_126_1 | 649 | 2203 |
| RFL 157 | R0934F.300k_Assembly_Contig_116_1 | 650 | 2204 |
| RFL 158 | R197.300k_Assembly_Contig_105_3 | 651 | 2205 |
| RFL 158 | Anapurna.300k_Assembly_Contig_89_3 | 652 | 2206 |
| RFL 158 | Wheat-Rye-6R.300k_Assembly_Contig_88_3 | 653 | 2207 |
| RFL 158 | R0934F.300k_Assembly_Contig_83_3 | 654 | 2208 |
| RFL 158 | Primepii.300k_Assembly_Contig_77_3 | 655 | 2209 |
| RFL 158 | R0932E.300k_Assembly_Contig_80_3 | 656 | 2210 |
| RFL 159 | Wheat-Rye-6R.300k_Assembly_Contig_177_1 | 657 | 2211 |
| RFL 159 | Wheat-Rye-6R.300k_Assembly_Contig_185_1 | 658 | 2212 |
| RFL 159 | Anapurna.300k_Assembly_Contig_176_1 | 659 | 2213 |
| RFL 159 | R197.300k_Assembly_Contig_191_1 | 660 | 2214 |
| RFL 160 | Triticum- | 661 | 2215 |
| | timopheevii.300k_Assembly_Contig_111_1 | | |
| RFL 161 | R197.300k_Assembly_Contig_28_3 | 662 | 2216 |
| RFL 161 | R0934F.300k_Assembly_Contig_13_3 | 663 | 2217 |
| RFL 161 | Anapurna.300k_Assembly_Contig_27_3 | 664 | 2218 |
| RFL 161 | R0932E.300k_Assembly_Contig_9_3 | 665 | 2219 |
| RFL 161 | Primepii.300k_Assembly_Contig_4_3 | 666 | 2220 |
| RFL 161 | R0932E.300k_Assembly_Contig_218_2 | 667 | 2221 |
| RFL 161 | Wheat-Rye-6R.300k_Assembly_Contig_4_4 | 668 | 2222 |
| RFL 162 | Triticum- | 669 | 2223 |
| | timopheevii.300k_Assembly_Contig_94_1 | | |
| RFL 163 | Primepii.300k_Assembly_Contig_128_1 | 670 | 2224 |
| RFL 163 | Wheat-Rye-6R.300k_Assembly_Contig_133_1 | 671 | 2225 |
| RFL 163 | R197.300k_Assembly_Contig_133_2 | 672 | 2226 |
| RFL 163 | R0932E.300k_Assembly_Contig_133_2 | 673 | 2227 |
| RFL 163 | R0934F.300k_Assembly_Contig_125_1 | 674 | 2228 |
| RFL 163 | Anapurna.300k_Assembly_Contig_122_2 | 675 | 2229 |
| RFL 164 | Primepii.300k_Assembly_Contig_127_1 | 676 | 2230 |
| RFL 164 | R0934F.300k_Assembly_Contig_124_1 | 677 | 2231 |
| RFL 165 | Anapurna.300k_Assembly_Contig_145_1 | 678 | 2232 |
| RFL 165 | R197.300k_Assembly_Contig_149_1 | 679 | 2233 |
| RFL 165 | Primepii.300k_Assembly_Contig_139_1 | 680 | 2234 |
| RFL 165 | R0932E.300k_Assembly_Contig_140_1 | 681 | 2235 |
| RFL 165 | Wheat-Rye-6R.300k_Assembly_Contig_139_1 | 682 | 2236 |
| RFL 165 | R0934F.300k_Assembly_Contig_132_1 | 683 | 2237 |
| RFL 166 | Primepii.300k_Assembly_Contig_130_1 | 684 | 2238 |
| RFL 166 | R0934F.300k_Assembly_Contig_122_2 | 685 | 2239 |
| RFL 167 | R197.300k_Assembly_Contig_118_1 | 686 | 2240 |
| RFL 167 | Anapurna.300k_Assembly_Contig_93_1 | 687 | 2241 |
| RFL 167 | R0932E.300k_Assembly_Contig_96_1 | 688 | 2242 |
| RFL 167 | R0934F.300k_Assembly_Contig_100_1 | 689 | 2243 |
| RFL 167 | Wheat-Rye-6R.300k_Assembly_Contig_107_1 | 690 | 2244 |
| RFL 167 | Primepii.300k_Assembly_Contig_100_1 | 691 | 2245 |
| RFL 168 | Triticum- | 692 | 2246 |
| | timopheevii.300k_Assembly_Contig_88_1 | | |
| RFL 168 | Triticum- | 693 | 2247 |
| | timopheevii.300k_Assembly_Contig_28_1 | | |
| RFL 169 | Triticum- | 694 | 2248 |
| | timopheevii.300k_Assembly_Contig_86_2 | | |
| RFL 170 | R197.300k_Assembly_Contig_94_2 | 695 | 2249 |
| RFL 170 | R0934F.300k_Assembly_Contig_67_2 | 696 | 2250 |
| RFL 170 | Primepii.300k_Assembly_Contig_60_2 | 697 | 2251 |
| RFL 170 | Wheat-Rye-6R.300k_Assembly_Contig_113_2 | 698 | 2252 |
| RFL 170 | Anapurna.300k_Assembly_Contig_174_3 | 699 | 2253 |
| RFL 171 | Triticum- | 700 | 2254 |
| | timopheevii.300k_Assembly_Contig_84_1 | | |
| RFL 171 | Triticum- | 701 | 2255 |
| | timopheevii.300k_Assembly_Contig_46_1 | | |
| RFL 172 | R0932E.300k_Assembly_Contig_67_1 | 702 | 2256 |
| RFL 172 | Wheat-Rye-6R.300k_Assembly_Contig_57_1 | 703 | 2257 |
| RFL 172 | R0934F.300k_Assembly_Contig_82_1 | 704 | 2258 |
| RFL 172 | Primepii.300k_Assembly_Contig_68_1 | 705 | 2259 |
| RFL 172 | Anapurna.300k_Assembly_Contig_32_1 | 706 | 2260 |
| RFL 172 | R197.300k_Assembly_Contig_61_1 | 707 | 2261 |
| RFL 173 | Triticum- | 708 | 2262 |
| | timopheevii.300k_Assembly_Contig_83_1 | | |
| RFL 174 | Triticum- | 709 | 2263 |
| | timopheevii.300k_Assembly_Contig_41_1 | | |
| RFL 174 | R197.300k_Assembly_Contig_102_1 | 710 | 2264 |
| RFL 174 | Triticum- | 711 | 2265 |
| | timopheevii.300k_Assembly_Contig_41_2 | | |
| RFL 175 | Primepii.300k_Assembly_Contig_200_1 | 712 | 2266 |
| RFL 175 | Primepii.300k_Assembly_Contig_162_1 | 713 | 2267 |
| RFL 175 | R0932E.300k_Assembly_Contig_144_1 | 714 | 2268 |
| RFL 175 | R0934F.300k_Assembly_Contig_156_1 | 715 | 2269 |
| RFL 175 | Anapurna.300k_Assembly_Contig_123_1 | 716 | 2270 |
| RFL 176 | R197.300k_Assembly_Contig_93_1 | 717 | 2271 |
| RFL 176 | R0934F.300k_Assembly_Contig_90_1 | 718 | 2272 |
| RFL 176 | Wheat-Rye-6R.300k_Assembly_Contig_100_1 | 719 | 2273 |
| RFL 176 | Anapurna.300k_Assembly_Contig_86_1 | 720 | 2274 |
| RFL 176 | R0932E.300k_Assembly_Contig_108_1 | 721 | 2275 |
| RFL 177 | R197.300k_Assembly_Contig_128_1 | 722 | 2276 |
| RFL 177 | Wheat-Rye-6R.300k_Assembly_Contig_126_1 | 723 | 2277 |
| RFL 177 | Anapurna.300k_Assembly_Contig_127_1 | 724 | 2278 |
| RFL 177 | R0932E.300k_Assembly_Contig_135_1 | 725 | 2279 |
| RFL 178 | Primepii.300k_Assembly_Contig_97_1 | 726 | 2280 |
| RFL 179 | Triticum- | 727 | 2281 |
| | timopheevii.300k_Assembly_Contig_89_1 | | |
| RFL 180 | R0932E.300k_Assembly_Contig_160_1 | 728 | 2282 |
| RFL 180 | Triticum- | 729 | 2283 |
| | timopheevii.300k_Assembly_Contig_97_1 | | |
| RFL 180 | Primepii.300k_Assembly_Contig_141_1 | 730 | 2284 |
| RFL 180 | R197.300k_Assembly_Contig_141_1 | 731 | 2285 |
| RFL 180 | Wheat-Rye-6R.300k_Assembly_Contig_149_1 | 732 | 2286 |
| RFL 180 | Anapurna.300k_Assembly_Contig_142_1 | 733 | 2287 |
| RFL 180 | R0934F.300k_Assembly_Contig_146_1 | 734 | 2288 |
| RFL 181 | Wheat-Rye-6R.300k_Assembly_Contig_104_1 | 735 | 2289 |
| RFL 181 | Primepii.300k_Assembly_Contig_104_1 | 736 | 2290 |
| RFL 182 | Wheat-Rye-6R.300k_Assembly_Contig_53_2 | 737 | 2291 |
| RFL 182 | R197.300k_Assembly_Contig_19_2 | 738 | 2292 |
| RFL 182 | R0932E.300k_Assembly_Contig_68_2 | 739 | 2293 |
| RFL 183 | R0932E.300k_Assembly_Contig_31_2 | 740 | 2294 |
| RFL 183 | R197.300k_Assembly_Contig_49_2 | 741 | 2295 |
| RFL 183 | R0934F.300k_Assembly_Contig_41_2 | 742 | 2296 |
| RFL 183 | Wheat-Rye-6R.300k_Assembly_Contig_27_2 | 743 | 2297 |
| RFL 183 | Triticum- | 744 | 2298 |
| | timopheevii.300k_Assembly_Contig_26_1 | | |
| RFL 183 | Anapurna.300k_Assembly_Contig_40_2 | 745 | 2299 |
| RFL 183 | Primepii.300k_Assembly_Contig_65_2 | 746 | 2300 |
| RFL 184 | R0932E.300k_Assembly_Contig_63_1 | 747 | 2301 |
| RFL 184 | R197.300k_Assembly_Contig_35_1 | 748 | 2302 |
| RFL 184 | Anapurna.300k_Assembly_Contig_170_1 | 749 | 2303 |
| RFL 184 | Wheat-Rye-6R.300k_Assembly_Contig_61_1 | 750 | 2304 |
| RFL 185 | R0934F.300k_Assembly_Contig_92_3 | 751 | 2305 |
| RFL 185 | Triticum- | 752 | 2306 |
| | timopheevii.300k_Assembly_Contig_52_3 | | |
| RFL 185 | R0932E.300k_Assembly_Contig_109_3 | 753 | 2307 |
| RFL 185 | R197.300k_Assembly_Contig_90_3 | 754 | 2308 |
| RFL 186 | Wheat-Rye-6R.300k_Assembly_Contig_131_1 | 755 | 2309 |
| RFL 186 | R0932E.300k_Assembly_Contig_141_1 | 756 | 2310 |
| RFL 186 | R197.300k_Assembly_Contig_143_1 | 757 | 2311 |
| RFL 186 | R0934F.300k_Assembly_Contig_133_1 | 758 | 2312 |
| RFL 186 | Anapurna.300k_Assembly_Contig_139_1 | 759 | 2313 |
| RFL 186 | Primepii.300k_Assembly_Contig_144_1 | 760 | 2314 |
| RFL 187 | R0934F.300k_Assembly_Contig_53_3 | 761 | 2315 |
| RFL 187 | Primepii.300k_Assembly_Contig_28_3 | 762 | 2316 |
| RFL 187 | R197.300k_Assembly_Contig_53_3 | 763 | 2317 |
| RFL 187 | R0932E.300k_Assembly_Contig_14_3 | 764 | 2318 |
| RFL 187 | Wheat-Rye-6R.300k_Assembly_Contig_49_3 | 765 | 2319 |
| RFL 187 | Anapurna.300k_Assembly_Contig_55_3 | 766 | 2320 |
| RFL 189 | Triticum- | 767 | 2321 |
| | timopheevii.300k_Assembly_Contig_23_1 | | |
| RFL 191 | R197.300k_Assembly_Contig_136_1 | 768 | 2322 |
| RFL 192 | R0934F.300k_Assembly_Contig_119_1 | 769 | 2323 |
| RFL 192 | R197.300k_Assembly_Contig_134_1 | 770 | 2324 |
| RFL 192 | Wheat-Rye-6R.300k_Assembly_Contig_125_1 | 771 | 2325 |
| RFL 192 | Primepii.300k_Assembly_Contig_133_1 | 772 | 2326 |
| RFL 192 | Anapurna.300k_Assembly_Contig_125_1 | 773 | 2327 |
| RFL 192 | R0932E.300k_Assembly_Contig_136_1 | 774 | 2328 |
| RFL 193 | R0932E.300k_Assembly_Contig_130_1 | 775 | 2329 |
| RFL 193 | R0934F.300k_Assembly_Contig_95_1 | 776 | 2330 |
| RFL 193 | Anapurna.300k_Assembly_Contig_107_1 | 777 | 2331 |
| RFL 193 | R197.300k_Assembly_Contig_110_1 | 778 | 2332 |
| RFL 194 | Primepii.300k_Assembly_Contig_107_1 | 779 | 2333 |
| RFL 194 | R197.300k_Assembly_Contig_99_1 | 780 | 2334 |
| RFL 194 | Wheat-Rye-6R.300k_Assembly_Contig_156_1 | 781 | 2335 |
| RFL 194 | R197.300k_Assembly_Contig_132_1 | 782 | 2336 |
| RFL 194 | Primepii.300k_Assembly_Contig_121_1 | 783 | 2337 |
| RFL 194 | Wheat-Rye-6R.300k_Assembly_Contig_51_1 | 784 | 2338 |
| RFL 195 | Wheat-Rye-6R.300k_Assembly_Contig_165_1 | 785 | 2339 |
| RFL 195 | R0934F.300k_Assembly_Contig_163_1 | 786 | 2340 |
| RFL 195 | R0932E.300k_Assembly_Contig_95_1 | 787 | 2341 |
| RFL 195 | Primepii.300k_Assembly_Contig_171_1 | 788 | 2342 |
| RFL 195 | Anapurna.300k_Assembly_Contig_2_4 | 789 | 2343 |
| RFL 195 | R197.300k_Assembly_Contig_176_1 | 790 | 2344 |
| RFL 196 | Anapurna.300k_Assembly_Contig_81_2 | 791 | 2345 |
| RFL 196 | R197.300k_Assembly_Contig_88_2 | 792 | 2346 |
| RFL 196 | Wheat-Rye-6R.300k_Assembly_Contig_114_2 | 793 | 2347 |
| RFL 196 | R0934F.300k_Assembly_Contig_112_2 | 794 | 2348 |
| RFL 196 | Primepii.300k_Assembly_Contig_103_2 | 795 | 2349 |
| RFL 196 | R0932E.300k_Assembly_Contig_106_2 | 796 | 2350 |
| RFL 197 | Wheat-Rye-6R.300k_Assembly_Contig_89_1 | 797 | 2351 |
| RFL 197 | R0932E.300k_Assembly_Contig_84_1 | 798 | 2352 |
| RFL 197 | R197.300k_Assembly_Contig_89_1 | 799 | 2353 |
| RFL 197 | Primepii.300k_Assembly_Contig_78_1 | 800 | 2354 |
| RFL 197 | Anapurna.300k_Assembly_Contig_65_1 | 801 | 2355 |
| RFL 197 | R0934F.300k_Assembly_Contig_105_1 | 802 | 2356 |
| RFL 198 | Wheat-Rye-6R.300k_Assembly_Contig_155_1 | 803 | 2357 |
| RFL 198 | R0934F.300k_Assembly_Contig_151_1 | 804 | 2358 |
| RFL 198 | R197.300k_Assembly_Contig_157_1 | 805 | 2359 |
| RFL 198 | Anapurna.300k_Assembly_Contig_150_1 | 806 | 2360 |
| RFL 198 | Primepii.300k_Assembly_Contig_157_1 | 807 | 2361 |
| RFL 198 | R0932E.300k_Assembly_Contig_169_1 | 808 | 2362 |
| RFL 199 | R0934F.300k_Assembly_Contig_170_1 | 809 | 2363 |
| RFL 199 | Anapurna.300k_Assembly_Contig_166_1 | 810 | 2364 |
| RFL 199 | R0932E.300k_Assembly_Contig_181_1 | 811 | 2365 |
| RFL 199 | R197.300k_Assembly_Contig_178_1 | 812 | 2366 |
| RFL 199 | Primepii.300k_Assembly_Contig_175_2 | 813 | 2367 |
| RFL 199 | Primepii.300k_Assembly_Contig_175_1 | 814 | 2368 |
| RFL 199 | Triticum- | 815 | 2369 |
| | timopheevii.300k_Assembly_Contig_110_1 | | |
| RFL 199 | Wheat-Rye-6R.300k_Assembly_Contig_171_1 | 816 | 2370 |
| RFL 200 | Wheat-Rye-6R.300k_Assembly_Contig_154_1 | 817 | 2371 |
| RFL 200 | Primepii.300k_Assembly_Contig_149_1 | 818 | 2372 |
| RFL 200 | R197.300k_Assembly_Contig_148_1 | 819 | 2373 |
| RFL 200 | Anapurna.300k_Assembly_Contig_151_1 | 820 | 2374 |
| RFL 200 | R0932E.300k_Assembly_Contig_158_1 | 821 | 2375 |
| RFL 200 | R0934F.300k_Assembly_Contig_135_1 | 822 | 2376 |
| RFL 201 | Anapurna.300k_Assembly_Contig_156_1 | 823 | 2377 |
| RFL 201 | Wheat-Rye-6R.300k_Assembly_Contig_152_1 | 824 | 2378 |
| RFL 201 | R0934F.300k_Assembly_Contig_162_1 | 825 | 2379 |
| RFL 201 | Triticum- | 826 | 2380 |
| | timopheevii.300k_Assembly_Contig_95_1 | | |
| RFL 201 | Primepii.300k_Assembly_Contig_153_1 | 827 | 2381 |
| RFL 201 | R197.300k_Assembly_Contig_162_1 | 828 | 2382 |
| RFL 201 | R0932E.300k_Assembly_Contig_159_1 | 829 | 2383 |
| RFL 202 | Anapurna.300k_Assembly_Contig_157_1 | 830 | 2384 |
| RFL 202 | Wheat-Rye-6R.300k_Assembly_Contig_164_1 | 831 | 2385 |
| RFL 202 | R197.300k_Assembly_Contig_166_1 | 832 | 2386 |
| RFL 202 | R0932E.300k_Assembly_Contig_165_1 | 833 | 2387 |
| RFL 202 | R0934F.300k_Assembly_Contig_154_1 | 834 | 2388 |
| RFL 202 | Primepii.300k_Assembly_Contig_167_1 | 835 | 2389 |
| RFL 203 | Triticum- | 836 | 2390 |
| | timopheevii.300k_Assembly_Contig_105_1 | | |
| RFL 203 | Triticum- | 837 | 2391 |
| | timopheevii.300k_Assembly_Contig_119_1 | | |
| RFL 203 | Wheat-Rye-6R.300k_Assembly_Contig_147_1 | 838 | 2392 |
| RFL 203 | R0932E.300k_Assembly_Contig_173_2 | 839 | 2393 |
| RFL 203 | R0932E.300k_Assembly_Contig_173_1 | 840 | 2394 |
| RFL 203 | Triticum- | 841 | 2395 |
| | timopheevii.300k_Assembly_Contig_3_1 | | |
| RFL 203 | Triticum- | 842 | 2396 |
| | timopheevii.300k_Assembly_Contig_120_1 | | |
| RFL 203 | R197.300k_Assembly_Contig_150_1 | 843 | 2397 |
| RFL 203 | Anapurna.300k_Assembly_Contig_153_1 | 844 | 2398 |
| RFL 203 | R0934F.300k_Assembly_Contig_157_2 | 845 | 2399 |
| RFL 203 | Primepii.300k_Assembly_Contig_156_1 | 846 | 2400 |
| RFL 203 | R0934F.300k_Assembly_Contig_157_1 | 847 | 2401 |
| RFL 204 | Triticum- | 848 | 2402 |
| | timopheevii.300k_Assembly_Contig_103_1 | | |
| RFL 204 | Triticum- | 849 | 2403 |
| | timopheevii.300k_Assembly_Contig_100_1 | | |
| RFL 205 | Triticum- | 850 | 2404 |
| | timopheevii.300k_Assembly_Contig_96_1 | | |
| RFL 205 | R0932E.300k_Assembly_Contig_155_1 | 851 | 2405 |
| RFL 205 | Anapurna.300k_Assembly_Contig_140_1 | 852 | 2406 |
| RFL 205 | Primepii.300k_Assembly_Contig_148_1 | 853 | 2407 |
| RFL 205 | R197.300k_Assembly_Contig_151_1 | 854 | 2408 |
| RFL 205 | R0934F.300k_Assembly_Contig_159_1 | 855 | 2409 |
| RFL 205 | Wheat-Rye-6R.300k_Assembly_Contig_151_1 | 856 | 2410 |
| RFL 206 | R0932E.300k_Assembly_Contig_117_1 | 857 | 2411 |
| RFL 207 | Triticum- | 858 | 2412 |
| | timopheevii.300k_Assembly_Contig_62_1 | | |
| RFL 208 | Wheat-Rye-6R.300k_Assembly_Contig_136_1 | 859 | 2413 |
| RFL 209 | Wheat-Rye-6R.300k_Assembly_Contig_143_1 | 860 | 2414 |
| RFL 209 | R0934F.300k_Assembly_Contig_140_1 | 861 | 2415 |
| RFL 209 | R0932E.300k_Assembly_Contig_174_1 | 862 | 2416 |
| RFL 209 | R197.300k_Assembly_Contig_154_1 | 863 | 2417 |
| RFL 209 | Primepii.300k_Assembly_Contig_152_1 | 864 | 2418 |
| RFL 209 | Anapurna.300k_Assembly_Contig_141_1 | 865 | 2419 |
| RFL 210 | Wheat-Rye-6R.300k_Assembly_Contig_163_1 | 866 | 2420 |
| RFL 210 | Anapurna.300k_Assembly_Contig_149_1 | 867 | 2421 |
| RFL 210 | R0934F.300k_Assembly_Contig_152_1 | 868 | 2422 |
| RFL 210 | R197.300k_Assembly_Contig_168_1 | 869 | 2423 |
| RFL 210 | R0932E.300k_Assembly_Contig_172_1 | 870 | 2424 |
| RFL 210 | Primepii.300k_Assembly_Contig_166_1 | 871 | 2425 |
| RFL 211 | Triticum- | 872 | 2426 |
| | timopheevii.300k_Assembly_Contig_99_1 | | |
| RFL 212 | R0932E.300k_Assembly_Contig_99_1 | 873 | 2427 |
| RFL 212 | R197.300k_Assembly_Contig_85_2 | 874 | 2428 |
| RFL 212 | R0932E.300k_Assembly_Contig_97_2 | 875 | 2429 |
| RFL 212 | Triticum- | 876 | 2430 |
| | timopheevii.300k_Assembly_Contig_73_1 | | |
| RFL 212 | R0934F.300k_Assembly_Contig_94_2 | 877 | 2431 |
| RFL 212 | Wheat-Rye-6R.300k_Assembly_Contig_91_1 | 878 | 2432 |
| RFL 212 | Primepii.300k_Assembly_Contig_76_2 | 879 | 2433 |
| RFL 212 | R197.300k_Assembly_Contig_109_1 | 880 | 2434 |
| RFL 212 | Primepii.300k_Assembly_Contig_99_1 | 881 | 2435 |
| RFL 212 | R0934F.300k_Assembly_Contig_107_1 | 882 | 2436 |
| RFL 212 | Wheat-Rye-6R.300k_Assembly_Contig_68_2 | 883 | 2437 |
| RFL 212 | Anapurna.300k_Assembly_Contig_96_1 | 884 | 2438 |
| RFL 212 | Triticum- | 885 | 2439 |
| | timopheevii.300k_Assembly_Contig_132_1 | | |
| RFL 212 | Anapurna.300k_Assembly_Contig_75_2 | 886 | 2440 |
| RFL 213 | Primepii.300k_Assembly_Contig_61_2 | 887 | 2441 |
| RFL 213 | Wheat-Rye-6R.300k_Assembly_Contig_64_2 | 888 | 2442 |
| RFL 213 | Anapurna.300k_Assembly_Contig_69_2 | 889 | 2443 |
| RFL 213 | R0934F.300k_Assembly_Contig_65_2 | 890 | 2444 |
| RFL 213 | R197.300k_Assembly_Contig_48_2 | 891 | 2445 |
| RFL 213 | R0932E.300k_Assembly_Contig_70_2 | 892 | 2446 |
| RFL 215 | Triticum- | 893 | 2447 |
| | timopheevii.300k_Assembly_Contig_98_1 | | |
| RFL 216 | R197.300k_Assembly_Contig_96_2 | 894 | 2448 |
| RFL 216 | R0932E.300k_Assembly_Contig_93_2 | 895 | 2449 |
| RFL 216 | Anapurna.300k_Assembly_Contig_126_1 | 896 | 2450 |
| RFL 216 | R0934F.300k_Assembly_Contig_102_2 | 897 | 2451 |
| RFL 217 | Triticum- | 898 | 2452 |
| | timopheevii.300k_Assembly_Contig_16_2 | | |
| RFL 218 | Primepii.300k_Assembly_Contig_95_2 | 899 | 2453 |
| RFL 218 | Wheat-Rye-6R.300k_Assembly_Contig_166_1 | 900 | 2454 |
| RFL 218 | R197.300k_Assembly_Contig_112_2 | 901 | 2455 |
| RFL 219 | R0932E.300k_Assembly_Contig_105_1 | 902 | 2456 |
| RFL 219 | Wheat-Rye-6R.300k_Assembly_Contig_110_1 | 903 | 2457 |
| RFL 219 | R197.300k_Assembly_Contig_87_1 | 904 | 2458 |
| RFL 219 | Anapurna.300k_Assembly_Contig_91_1 | 905 | 2459 |
| RFL 219 | R0934F.300k_Assembly_Contig_101_1 | 906 | 2460 |
| RFL 219 | Primepii.300k_Assembly_Contig_98_1 | 907 | 2461 |
| RFL 220 | Primepii.300k_Assembly_Contig_115_2 | 908 | 2462 |
| RFL 220 | Wheat-Rye-6R.300k_Assembly_Contig_108_2 | 909 | 2463 |
| RFL 221 | R0934F.300k_Assembly_Contig_47_2 | 910 | 2464 |
| RFL 221 | R0932E.300k_Assembly_Contig_33_2 | 911 | 2465 |
| RFL 221 | Wheat-Rye-6R.300k_Assembly_Contig_16_2 | 912 | 2466 |
| RFL 221 | Anapurna.300k_Assembly_Contig_30_2 | 913 | 2467 |
| RFL 221 | R197.300k_Assembly_Contig_52_2 | 914 | 2468 |
| RFL 221 | Primepii.300k_Assembly_Contig_15_2 | 915 | 2469 |
| RFL 222 | Wheat-Rye-6R.300k_Assembly_Contig_97_1 | 916 | 2470 |
| RFL 222 | R197.300k_Assembly_Contig_108_1 | 917 | 2471 |
| RFL 222 | Anapurna.300k_Assembly_Contig_101_1 | 918 | 2472 |
| RFL 223 | R0934F.300k_Assembly_Contig_58_2 | 919 | 2473 |
| RFL 223 | Anapurna.300k_Assembly_Contig_25_3 | 920 | 2474 |
| RFL 223 | Wheat-Rye-6R.300k_Assembly_Contig_46_3 | 921 | 2475 |
| RFL 223 | R197.300k_Assembly_Contig_45_3 | 922 | 2476 |
| RFL 223 | R0932E.300k_Assembly_Contig_219_3 | 923 | 2477 |
| RFL 223 | Primepii.300k_Assembly_Contig_36_2 | 924 | 2478 |
| RFL 223 | R0932E.300k_Assembly_Contig_57_3 | 925 | 2479 |
| RFL 224 | R0932E.300k_Assembly_Contig_212_1 | 926 | 2480 |
| RFL 225 | R0932E.300k_Assembly_Contig_117_2 | 927 | 2481 |
| RFL 226 | R0932E.300k_Assembly_Contig_67_2 | 928 | 2482 |
| RFL 226 | Primepii.300k_Assembly_Contig_118_1 | 929 | 2483 |
| RFL 226 | Wheat-Rye-6R.300k_Assembly_Contig_101_1 | 930 | 2484 |
| RFL 226 | Wheat-Rye-6R.300k_Assembly_Contig_57_2 | 931 | 2485 |
| RFL 226 | R0934F.300k_Assembly_Contig_82_2 | 932 | 2486 |
| RFL 226 | Anapurna.300k_Assembly_Contig_95_1 | 933 | 2487 |
| RFL 226 | R0934F.300k_Assembly_Contig_98_1 | 934 | 2488 |
| RFL 226 | Primepii.300k_Assembly_Contig_68_2 | 935 | 2489 |
| RFL 226 | Anapurna.300k_Assembly_Contig_32_2 | 936 | 2490 |
| RFL 226 | R197.300k_Assembly_Contig_61_2 | 937 | 2491 |
| RFL 227 | R0934F.300k_Assembly_Contig_62_1 | 938 | 2492 |
| RFL 227 | Primepii.300k_Assembly_Contig_196_1 | 939 | 2493 |
| RFL 228 | R197.300k_Assembly_Contig_85_1 | 940 | 2494 |
| RFL 228 | Wheat-Rye-6R.300k_Assembly_Contig_68_1 | 941 | 2495 |
| RFL 228 | R0934F.300k_Assembly_Contig_94_1 | 942 | 2496 |
| RFL 228 | R0932E.300k_Assembly_Contig_97_1 | 943 | 2497 |
| RFL 228 | Anapurna.300k_Assembly_Contig_75_1 | 944 | 2498 |
| RFL 228 | Primepii.300k_Assembly_Contig_76_1 | 945 | 2499 |
| RFL 229 | R0932E.300k_Assembly_Contig_30_3 | 946 | 2500 |
| RFL 229 | R197.300k_Assembly_Contig_26_5 | 947 | 2501 |
| RFL 229 | Anapurna.300k_Assembly_Contig_26_4 | 948 | 2502 |
| RFL 229 | Wheat-Rye-6R.300k_Assembly_Contig_24_5 | 949 | 2503 |
| RFL 229 | Primepii.300k_Assembly_Contig_33_3 | 950 | 2504 |
| RFL 229 | R0934F.300k_Assembly_Contig_16_5 | 951 | 2505 |
| RFL 230 | R0932E.300k_Assembly_Contig_209_2 | 952 | 2506 |
| RFL 231 | R0932E.300k_Assembly_Contig_36_1 | 953 | 2507 |
| RFL 231 | R0934F.300k_Assembly_Contig_42_1 | 954 | 2508 |
| RFL 231 | R197.300k_Assembly_Contig_55_1 | 955 | 2509 |
| RFL 231 | Anapurna.300k_Assembly_Contig_44_1 | 956 | 2510 |
| RFL 231 | Wheat-Rye-6R.300k_Assembly_Contig_33_1 | 957 | 2511 |
| RFL 231 | Primepii.300k_Assembly_Contig_54_1 | 958 | 2512 |
| RFL 232 | R0932E.300k_Assembly_Contig_171_1 | 959 | 2513 |
| RFL 232 | Primepii.300k_Assembly_Contig_173_1 | 960 | 2514 |
| RFL 232 | Wheat-Rye-6R.300k_Assembly_Contig_168_1 | 961 | 2515 |
| RFL 232 | R197.300k_Assembly_Contig_177_1 | 962 | 2516 |
| RFL 232 | Anapurna.300k_Assembly_Contig_165_1 | 963 | 2517 |
| RFL 232 | R0934F.300k_Assembly_Contig_158_1 | 964 | 2518 |
| RFL 234 | Triticum- | 965 | 2519 |
| | timopheevii.300k_Assembly_Contig_101_1 | | |
| RFL 235 | Triticum- | 966 | 2520 |
| | timopheevii.300k_Assembly_Contig_75_1 | | |
| RFL 236 | R0934F.300k_Assembly_Contig_33_2 | 967 | 2521 |
| RFL 236 | R0932E.300k_Assembly_Contig_52_1 | 968 | 2522 |
| RFL 236 | Primepii.300k_Assembly_Contig_29_3 | 969 | 2523 |
| RFL 236 | Wheat-Rye-6R.300k_Assembly_Contig_38_1 | 970 | 2524 |
| RFL 236 | R197.300k_Assembly_Contig_50_2 | 971 | 2525 |
| RFL 236 | Anapurna.300k_Assembly_Contig_34_2 | 972 | 2526 |
| RFL 237 | R0934F.300k_Assembly_Contig_118_1 | 973 | 2527 |
| RFL 237 | Triticum- | 974 | 2528 |
| | timopheevii.300k_Assembly_Contig_82_1 | | |
| RFL 238 | Primepii.300k_Assembly_Contig_29_4 | 975 | 2529 |
| RFL 238 | R0934F.300k_Assembly_Contig_33_3 | 976 | 2530 |
| RFL 238 | Anapurna.300k_Assembly_Contig_34_3 | 977 | 2531 |
| RFL 238 | R0932E.300k_Assembly_Contig_52_2 | 978 | 2532 |
| RFL 238 | Wheat-Rye-6R.300k_Assembly_Contig_38_2 | 979 | 2533 |
| RFL 238 | R197.300k_Assembly_Contig_50_3 | 980 | 2534 |
| RFL 239 | Anapurna.300k_Assembly_Contig_92_1 | 981 | 2535 |
| RFL 239 | Wheat-Rye-6R.300k_Assembly_Contig_103_1 | 982 | 2536 |
| RFL 240 | Primepii.300k_Assembly_Contig_140_1 | 983 | 2537 |
| RFL 240 | R197.300k_Assembly_Contig_156_1 | 984 | 2538 |
| RFL 240 | R0932E.300k_Assembly_Contig_148_1 | 985 | 2539 |
| RFL 240 | R0934F.300k_Assembly_Contig_136_1 | 986 | 2540 |
| RFL 241 | Primepii.300k_Assembly_Contig_138_1 | 987 | 2541 |
| RFL 241 | Wheat-Rye-6R.300k_Assembly_Contig_134_2 | 988 | 2542 |
| RFL 241 | R197.300k_Assembly_Contig_164_2 | 989 | 2543 |
| RFL 241 | R0932E.300k_Assembly_Contig_143_1 | 990 | 2544 |
| RFL 241 | Anapurna.300k_Assembly_Contig_136_1 | 991 | 2545 |
| RFL 241 | R0934F.300k_Assembly_Contig_137_1 | 992 | 2546 |
| RFL 242 | Anapurna.300k_Assembly_Contig_72_1 | 993 | 2547 |
| RFL 243 | Anapurna.300k_Assembly_Contig_8_2 | 994 | 2548 |
| RFL 244 | Anapurna.300k_Assembly_Contig_164_1 | 995 | 2549 |
| RFL 245 | R0934F.300k_Assembly_Contig_58_1 | 996 | 2550 |
| RFL 245 | Anapurna.300k_Assembly_Contig_25_2 | 997 | 2551 |
| RFL 245 | R0932E.300k_Assembly_Contig_57_2 | 998 | 2552 |
| RFL 245 | Wheat-Rye-6R.300k_Assembly_Contig_46_2 | 999 | 2553 |
| RFL 245 | R197.300k_Assembly_Contig_45_2 | 1000 | 2554 |
| RFL 245 | Primepii.300k_Assembly_Contig_36_1 | 1001 | 2555 |
| RFL 245 | R0932E.300k_Assembly_Contig_219_2 | 1002 | 2556 |
| RFL 246 | Primepii.300k_Assembly_Contig_116_2 | 1003 | 2557 |
| RFL 246 | Anapurna.300k_Assembly_Contig_90_3 | 1004 | 2558 |
| RFL 246 | R197.300k_Assembly_Contig_125_2 | 1005 | 2559 |
| RFL 246 | Wheat-Rye-6R.300k_Assembly_Contig_102_2 | 1006 | 2560 |
| RFL 246 | R0934F.300k_Assembly_Contig_96_2 | 1007 | 2561 |
| RFL 246 | R0932E.300k_Assembly_Contig_125_2 | 1008 | 2562 |
| RFL 247 | R0932E.300k_Assembly_Contig_53_1 | 1009 | 2563 |
| RFL 247 | R0934F.300k_Assembly_Contig_26_1 | 1010 | 2564 |
| RFL 247 | Primepii.300k_Assembly_Contig_40_1 | 1011 | 2565 |
| RFL 247 | Anapurna.300k_Assembly_Contig_29_1 | 1012 | 2566 |
| RFL 247 | R197.300k_Assembly_Contig_36_1 | 1013 | 2567 |
| RFL 247 | Wheat-Rye-6R.300k_Assembly_Contig_28_1 | 1014 | 2568 |
| RFL 247 | Triticum- | 1015 | 2569 |
| | timopheevii.300k_Assembly_Contig_25_1 | | |
| RFL 248 | R0934F.300k_Assembly_Contig_183_1 | 1016 | 2570 |
| RFL 248 | Wheat-Rye-6R.300k_Assembly_Contig_176_1 | 1017 | 2571 |
| RFL 248 | R0932E.300k_Assembly_Contig_180_1 | 1018 | 2572 |
| RFL 249 | Anapurna.300k_Assembly_Contig_130_1 | 1019 | 2573 |
| RFL 249 | Wheat-Rye-6R.300k_Assembly_Contig_128_1 | 1020 | 2574 |
| RFL 249 | R197.300k_Assembly_Contig_144_1 | 1021 | 2575 |
| RFL 249 | R0934F.300k_Assembly_Contig_131_1 | 1022 | 2576 |
| RFL 249 | R0932E.300k_Assembly_Contig_137_1 | 1023 | 2577 |
| RFL 249 | Primepii.300k_Assembly_Contig_135_1 | 1024 | 2578 |
| RFL 250 | Wheat-Rye-6R.300k_Assembly_Contig_47_2 | 1025 | 2579 |
| RFL 250 | Primepii.300k_Assembly_Contig_69_2 | 1026 | 2580 |
| RFL 250 | R0932E.300k_Assembly_Contig_69_2 | 1027 | 2581 |
| RFL 250 | Anapurna.300k_Assembly_Contig_56_2 | 1028 | 2582 |
| RFL 250 | R0934F.300k_Assembly_Contig_59_2 | 1029 | 2583 |
| RFL 250 | R197.300k_Assembly_Contig_91_2 | 1030 | 2584 |
| RFL 251 | R197.300k_Assembly_Contig_26_6 | 1031 | 2585 |
| RFL 251 | Triticum- | 1032 | 2586 |
| | timopheevii.300k_Assembly_Contig_108_1 | | |
| RFL 251 | Anapurna.300k_Assembly_Contig_26_5 | 1033 | 2587 |
| RFL 251 | R0932E.300k_Assembly_Contig_30_4 | 1034 | 2588 |
| RFL 251 | Wheat-Rye-6R.300k_Assembly_Contig_24_6 | 1035 | 2589 |
| RFL 251 | Primepii.300k_Assembly_Contig_33_4 | 1036 | 2590 |
| RFL 251 | R0934F.300k_Assembly_Contig_16_6 | 1037 | 2591 |
| RFL 252 | Primepii.300k_Assembly_Contig_189_1 | 1038 | 2592 |
| RFL 252 | R0934F.300k_Assembly_Contig_169_1 | 1039 | 2593 |
| RFL 253 | Wheat-Rye-6R.300k_Assembly_Contig_112_2 | 1040 | 2594 |
| RFL 253 | R0932E.300k_Assembly_Contig_111_2 | 1041 | 2595 |
| RFL 253 | R0934F.300k_Assembly_Contig_130_2 | 1042 | 2596 |
| RFL 253 | Anapurna.300k_Assembly_Contig_88_2 | 1043 | 2597 |
| RFL 254 | R0932E.300k_Assembly_Contig_119_2 | 1044 | 2598 |
| RFL 254 | R0934F.300k_Assembly_Contig_108_2 | 1045 | 2599 |
| RFL 254 | Triticum- | 1046 | 2600 |
| | timopheevii.300k_Assembly_Contig_77_2 | | |
| RFL 254 | R197.300k_Assembly_Contig_122_2 | 1047 | 2601 |
| RFL 254 | Wheat-Rye-6R.300k_Assembly_Contig_116_2 | 1048 | 2602 |
| RFL 254 | Anapurna.300k_Assembly_Contig_103_2 | 1049 | 2603 |
| RFL 254 | Primepii.300k_Assembly_Contig_101_2 | 1050 | 2604 |
| RFL 255 | R0934F.300k_Assembly_Contig_212_1 | 1051 | 2605 |
| RFL 256 | Wheat-Rye-6R.300k_Assembly_Contig_76_1 | 1052 | 2606 |
| RFL 256 | R0934F.300k_Assembly_Contig_79_1 | 1053 | 2607 |
| RFL 256 | Triticum- | 1054 | 2608 |
| | timopheevii.300k_Assembly_Contig_32_1 | | |
| RFL 256 | R0932E.300k_Assembly_Contig_81_1 | 1055 | 2609 |
| RFL 256 | Anapurna.300k_Assembly_Contig_67_1 | 1056 | 2610 |
| RFL 256 | Primepii.300k_Assembly_Contig_89_1 | 1057 | 2611 |
| RFL 256 | R197.300k_Assembly_Contig_74_1 | 1058 | 2612 |
| RFL 257 | Primepii.300k_Assembly_Contig_71_1 | 1059 | 2613 |
| RFL 257 | Wheat-Rye-6R.300k_Assembly_Contig_78_1 | 1060 | 2614 |
| RFL 257 | R0932E.300k_Assembly_Contig_101_1 | 1061 | 2615 |
| RFL 257 | R0934F.300k_Assembly_Contig_85_1 | 1062 | 2616 |
| RFL 257 | R197.300k_Assembly_Contig_76_1 | 1063 | 2617 |
| RFL 257 | Anapurna.300k_Assembly_Contig_79_1 | 1064 | 2618 |
| RFL 258 | Primepii.300k_Assembly_Contig_41_1 | 1065 | 2619 |
| RFL 259 | Triticum- | 1066 | 2620 |
| | timopheevii.300k_Assembly_Contig_76_2 | | |
| RFL 260 | Anapurna.300k_Assembly_Contig_155_1 | 1067 | 2621 |
| RFL 260 | R0932E.300k_Assembly_Contig_163_2 | 1068 | 2622 |
| RFL 260 | R0934F.300k_Assembly_Contig_160_1 | 1069 | 2623 |
| RFL 260 | Wheat-Rye-6R.300k_Assembly_Contig_162_1 | 1070 | 2624 |
| RFL 260 | R197.300k_Assembly_Contig_171_1 | 1071 | 2625 |
| RFL 260 | Primepii.300k_Assembly_Contig_146_1 | 1072 | 2626 |
| RFL 261 | Triticum- | 1073 | 2627 |
| | timopheevii.300k_Assembly_Contig_90_2 | | |
| RFL 262 | Primepii.300k_Assembly_Contig_172_1 | 1074 | 2628 |
| RFL 262 | Wheat-Rye-6R.300k_Assembly_Contig_159_1 | 1075 | 2629 |
| RFL 262 | R197.300k_Assembly_Contig_167_1 | 1076 | 2630 |
| RFL 263 | R197.300k_Assembly_Contig_126_1 | 1077 | 2631 |
| RFL 263 | Wheat-Rye-6R.300k_Assembly_Contig_157_1 | 1078 | 2632 |
| RFL 263 | Wheat-Rye-6R.300k_Assembly_Contig_189_1 | 1079 | 2633 |
| RFL 263 | R0932E.300k_Assembly_Contig_132_1 | 1080 | 2634 |
| RFL 263 | Anapurna.300k_Assembly_Contig_114_1 | 1081 | 2635 |
| RFL 264 | Triticum- | 1082 | 2636 |
| | timopheevii.300k_Assembly_Contig_64_1 | | |
| RFL 265 | R197.300k_Assembly_Contig_129_1 | 1083 | 2637 |
| RFL 265 | R0934F.300k_Assembly_Contig_120_1 | 1084 | 2638 |
| RFL 265 | Wheat-Rye-6R.300k_Assembly_Contig_118_1 | 1085 | 2639 |
| RFL 265 | Anapurna.300k_Assembly_Contig_102_1 | 1086 | 2640 |
| RFL 265 | Triticum- | 1087 | 2641 |
| | timopheevii.300k_Assembly_Contig_79_1 | | |
| RFL 265 | Primepii.300k_Assembly_Contig_123_1 | 1088 | 2642 |
| RFL 265 | R0932E.300k_Assembly_Contig_127_1 | 1089 | 2643 |
| RFL 266 | Triticum- | 1090 | 2644 |
| | timopheevii.300k_Assembly_Contig_17_2 | | |
| RFL 267 | Triticum- | 1091 | 2645 |
| | timopheevii.300k_Assembly_Contig_90_3 | | |
| RFL 268 | R197.300k_Assembly_Contig_90_4 | 1092 | 2646 |
| RFL 268 | Triticum- | 1093 | 2647 |
| | timopheevii.300k_Assembly_Contig_52_4 | | |
| RFL 268 | R0934F.300k_Assembly_Contig_92_4 | 1094 | 2648 |
| RFL 268 | R0932E.300k_Assembly_Contig_109_4 | 1095 | 2649 |
| RFL 269 | Triticum- | 1096 | 2650 |
| | timopheevii.300k_Assembly_Contig_84_2 | | |
| RFL 270 | Triticum- | 1097 | 2651 |
| | timopheevii.300k_Assembly_Contig_56_1 | | |
| RFL 271 | R0932E.300k_Assembly_Contig_167_1 | 1098 | 2652 |
| RFL 272 | Triticum- | 1099 | 2653 |
| | timopheevii.300k_Assembly_Contig_17_1 | | |
| RFL 273 | Primepii.300k_Assembly_Contig_84_2 | 1100 | 2654 |
| RFL 273 | R0932E.300k_Assembly_Contig_212_2 | 1101 | 2655 |
| RFL 273 | R0934F.300k_Assembly_Contig_62_2 | 1102 | 2656 |
| RFL 274 | Triticum- | 1103 | 2657 |
| | timopheevii.300k_Assembly_Contig_87_1 | | |
| RFL 275 | Anapurna.300k_Assembly_Contig_208_1 | 1104 | 2658 |
| RFL 276 | R0934F.300k_Assembly_Contig_42_2 | 1105 | 2659 |
| RFL 276 | R197.300k_Assembly_Contig_55_2 | 1106 | 2660 |
| RFL 276 | R0932E.300k_Assembly_Contig_36_2 | 1107 | 2661 |
| RFL 276 | Primepii.300k_Assembly_Contig_54_2 | 1108 | 2662 |
| RFL 276 | Wheat-Rye-6R.300k_Assembly_Contig_33_2 | 1109 | 2663 |
| RFL 276 | Anapurna.300k_Assembly_Contig_44_2 | 1110 | 2664 |
| RFL 277 | Triticum- | 1111 | 2665 |
| | timopheevii.300k_Assembly_Contig_2_1 | | |
| RFL 277 | R0934F.300k_Assembly_Contig_3_1 | 1112 | 2666 |
| RFL 278 | Triticum- | 1113 | 2667 |
| | timopheevii.300k_Assembly_Contig_85_2 | | |
| RFL 279 | Wheat-Rye-6R.300k_Assembly_Contig_56_2 | 1114 | 2668 |
| RFL 279 | R0934F.300k_Assembly_Contig_60_2 | 1115 | 2669 |
| RFL 279 | Anapurna.300k_Assembly_Contig_60_3 | 1116 | 2670 |
| RFL 279 | Primepii.300k_Assembly_Contig_56_3 | 1117 | 2671 |
| RFL 279 | R197.300k_Assembly_Contig_60_2 | 1118 | 2672 |
| RFL 279 | R0932E.300k_Assembly_Contig_2_2 | 1119 | 2673 |
| RFL 280 | R0934F.300k_Assembly_Contig_129_1 | 1120 | 2674 |
| RFL 280 | R197.300k_Assembly_Contig_139_1 | 1121 | 2675 |
| RFL 280 | Anapurna.300k_Assembly_Contig_129_1 | 1122 | 2676 |
| RFL 280 | Wheat-Rye-6R.300k_Assembly_Contig_127_1 | 1123 | 2677 |
| RFL 280 | Primepii.300k_Assembly_Contig_136_2 | 1124 | 2678 |
| RFL 280 | R0932E.300k_Assembly_Contig_138_1 | 1125 | 2679 |
| RFL 281 | Triticum- | 1126 | 2680 |
| | timopheevii.300k_Assembly_Contig_23_2 | | |
| RFL 282 | R197.300k_Assembly_Contig_181_1 | 1127 | 2681 |
| RFL 282 | Wheat-Rye-6R.300k_Assembly_Contig_186_1 | 1128 | 2682 |
| RFL 282 | R0932E.300k_Assembly_Contig_95_2 | 1129 | 2683 |
| RFL 282 | Primepii.300k_Assembly_Contig_177_1 | 1130 | 2684 |
| RFL 282 | R0934F.300k_Assembly_Contig_155_1 | 1131 | 2685 |
| RFL 282 | Wheat-Rye-6R.300k_Assembly_Contig_119_1 | 1132 | 2686 |
| RFL 282 | R197.300k_Assembly_Contig_106_1 | 1133 | 2687 |
| RFL 282 | Primepii.300k_Assembly_Contig_161_1 | 1134 | 2688 |
| RFL 282 | Anapurna.300k_Assembly_Contig_160_1 | 1135 | 2689 |
| RFL 282 | R197.300k_Assembly_Contig_219_1 | 1136 | 2690 |
| RFL 282 | Anapurna.300k_Assembly_Contig_198_1 | 1137 | 2691 |
| RFL 282 | Anapurna.300k_Assembly_Contig_100_1 | 1138 | 2692 |
| RFL 282 | Wheat-Rye-6R.300k_Assembly_Contig_170_1 | 1139 | 2693 |
| RFL 283 | R0934F.300k_Assembly_Contig_79_2 | 1140 | 2694 |
| RFL 283 | Wheat-Rye-6R.300k_Assembly_Contig_76_2 | 1141 | 2695 |
| RFL 283 | Triticum- | 1142 | 2696 |
| | timopheevii.300k_Assembly_Contig_32_2 | | |
| RFL 283 | Primepii.300k_Assembly_Contig_89_2 | 1143 | 2697 |
| RFL 283 | R197.300k_Assembly_Contig_74_2 | 1144 | 2698 |
| RFL 283 | R0932E.300k_Assembly_Contig_81_2 | 1145 | 2699 |
| RFL 283 | Anapurna.300k_Assembly_Contig_67_2 | 1146 | 2700 |
| RFL 284 | Primepii.300k_Assembly_Contig_84_1 | 1147 | 2701 |
| RFL 285 | Primepii.300k_Assembly_Contig_111_2 | 1148 | 2702 |
| RFL 286 | Triticum- | 1149 | 2703 |
| | timopheevii.300k_Assembly_Contig_55_2 | | |
| RFL 287 | Anapurna.300k_Assembly_Contig_154_2 | 1150 | 2704 |
| RFL 287 | Wheat-Rye-6R.300k_Assembly_Contig_142_2 | 1151 | 2705 |
| RFL 287 | R197.300k_Assembly_Contig_153_2 | 1152 | 2706 |
| RFL 287 | Primepii.300k_Assembly_Contig_158_2 | 1153 | 2707 |
| RFL 288 | Primepii.300k_Assembly_Contig_60_1 | 1154 | 2708 |
| RFL 288 | R0934F.300k_Assembly_Contig_67_1 | 1155 | 2709 |
| RFL 289 | R0932E.300k_Assembly_Contig_206_2 | 1156 | 2710 |
| RFL 290 | R0932E.300k_Assembly_Contig_166_2 | 1157 | 2711 |
| RFL 290 | R0934F.300k_Assembly_Contig_166_2 | 1158 | 2712 |
| RFL 290 | Primepii.300k_Assembly_Contig_174_2 | 1159 | 2713 |
| RFL 290 | R197.300k_Assembly_Contig_174_2 | 1160 | 2714 |
| RFL 290 | Anapurna.300k_Assembly_Contig_161_2 | 1161 | 2715 |
| RFL 290 | Wheat-Rye-6R.300k_Assembly_Contig_161_2 | 1162 | 2716 |
| RFL 291 | Anapurna.300k_Assembly_Contig_27_2 | 1163 | 2717 |
| RFL 291 | R0932E.300k_Assembly_Contig_9_2 | 1164 | 2718 |
| RFL 291 | Wheat-Rye-6R.300k_Assembly_Contig_4_3 | 1165 | 2719 |
| RFL 292 | Triticum- | 1166 | 2720 |
| | timopheevii.300k_Assembly_Contig_68_2 | | |
| RFL 293 | R197.300k_Assembly_Contig_73_1 | 1167 | 2721 |
| RFL 294 | Primepii.300k_Assembly_Contig_116_1 | 1168 | 2722 |
| RFL 294 | Wheat-Rye-6R.300k_Assembly_Contig_102_1 | 1169 | 2723 |
| RFL 294 | Anapurna.300k_Assembly_Contig_90_2 | 1170 | 2724 |
| RFL 294 | R197.300k_Assembly_Contig_125_1 | 1171 | 2725 |
| RFL 294 | R0934F.300k_Assembly_Contig_96_1 | 1172 | 2726 |
| RFL 294 | R0932E.300k_Assembly_Contig_125_1 | 1173 | 2727 |
| RFL 295 | Triticum- | 1174 | 2728 |
| | timopheevii.300k_Assembly_Contig_112_1 | | |
| RFL 296 | R197.300k_Assembly_Contig_159_1 | 1175 | 2729 |
| RFL 296 | Wheat-Rye-6R.300k_Assembly_Contig_146_1 | 1176 | 2730 |
| RFL 296 | Primepii.300k_Assembly_Contig_154_1 | 1177 | 2731 |
| RFL 296 | R0934F.300k_Assembly_Contig_144_1 | 1178 | 2732 |
| RFL 296 | Anapurna.300k_Assembly_Contig_152_1 | 1179 | 2733 |
| RFL 296 | R0932E.300k_Assembly_Contig_149_1 | 1180 | 2734 |
| RFL 297 | R0932E.300k_Assembly_Contig_129_1 | 1181 | 2735 |
| RFL 297 | Anapurna.300k_Assembly_Contig_120_1 | 1182 | 2736 |
| RFL 297 | Primepii.300k_Assembly_Contig_129_1 | 1183 | 2737 |
| RFL 297 | R197.300k_Assembly_Contig_145_1 | 1184 | 2738 |
| RFL 297 | R0934F.300k_Assembly_Contig_121_1 | 1185 | 2739 |
| RFL 297 | Wheat-Rye-6R.300k_Assembly_Contig_129_1 | 1186 | 2740 |
| RFL 298 | Wheat-Rye-6R.300k_Assembly_Contig_120_1 | 1187 | 2741 |
| RFL 298 | Anapurna.300k_Assembly_Contig_110_1 | 1188 | 2742 |
| RFL 298 | R197.300k_Assembly_Contig_124_1 | 1189 | 2743 |
| RFL 298 | R0932E.300k_Assembly_Contig_124_1 | 1190 | 2744 |
| RFL 298 | Primepii.300k_Assembly_Contig_124_1 | 1191 | 2745 |
| RFL 298 | R0934F.300k_Assembly_Contig_127_1 | 1192 | 2746 |
| RFL 299 | R197.300k_Assembly_Contig_195_2 | 1193 | 2747 |
| RFL 299 | R0934F.300k_Assembly_Contig_192_1 | 1194 | 2748 |
| RFL 299 | Wheat-Rye-6R.300k_Assembly_Contig_192_1 | 1195 | 2749 |
| RFL 300 | Wheat-Rye-6R.300k_Assembly_Contig_111_2 | 1196 | 2750 |
| RFL 300 | R197.300k_Assembly_Contig_121_2 | 1197 | 2751 |
| RFL 300 | Primepii.300k_Assembly_Contig_113_2 | 1198 | 2752 |
| RFL 301 | Anapurna.300k_Assembly_Contig_69_3 | 1199 | 2753 |
| RFL 301 | Primepii.300k_Assembly_Contig_61_3 | 1200 | 2754 |
| RFL 301 | R197.300k_Assembly_Contig_48_3 | 1201 | 2755 |
| RFL 301 | R0934F.300k_Assembly_Contig_65_3 | 1202 | 2756 |
| RFL 301 | Wheat-Rye-6R.300k_Assembly_Contig_64_3 | 1203 | 2757 |
| RFL 301 | R0932E.300k_Assembly_Contig_70_3 | 1204 | 2758 |
| RFL 302 | Triticum- | 1205 | 2759 |
| | timopheevii.300k_Assembly_Contig_24_2 | | |
| RFL 303 | Wheat-Rye-6R.300k_Assembly_Contig_199_1 | 1206 | 2760 |
| RFL 303 | Anapurna.300k_Assembly_Contig_195_1 | 1207 | 2761 |
| RFL 304 | Anapurna.300k_Assembly_Contig_120_2 | 1208 | 2762 |
| RFL 304 | R0932E.300k_Assembly_Contig_129_2 | 1209 | 2763 |
| RFL 304 | Primepii.300k_Assembly_Contig_129_2 | 1210 | 2764 |
| RFL 304 | R197.300k_Assembly_Contig_145_2 | 1211 | 2765 |
| RFL 304 | Wheat-Rye-6R.300k_Assembly_Contig_129_2 | 1212 | 2766 |
| RFL 304 | R0934F.300k_Assembly_Contig_121_2 | 1213 | 2767 |
| RFL 305 | Wheat-Rye-6R.300k_Assembly_Contig_135_1 | 1214 | 2768 |
| RFL 306 | R197.300k_Assembly_Contig_107_2 | 1215 | 2769 |
| RFL 306 | R0934F.300k_Assembly_Contig_88_2 | 1216 | 2770 |
| RFL 306 | Anapurna.300k_Assembly_Contig_76_2 | 1217 | 2771 |
| RFL 306 | Primepii.300k_Assembly_Contig_74_2 | 1218 | 2772 |
| RFL 306 | R0932E.300k_Assembly_Contig_115_2 | 1219 | 2773 |
| RFL 306 | Wheat-Rye-6R.300k_Assembly_Contig_81_2 | 1220 | 2774 |
| RFL 307 | Triticum- | 1221 | 2775 |
| | timopheevii.300k_Assembly_Contig_104_1 | | |
| RFL 308 | R197.300k_Assembly_Contig_198_1 | 1222 | 2776 |
| RFL 308 | R0932E.300k_Assembly_Contig_178_2 | 1223 | 2777 |
| RFL 308 | Wheat-Rye-6R.300k_Assembly_Contig_193_1 | 1224 | 2778 |
| RFL 308 | Anapurna.300k_Assembly_Contig_183_1 | 1225 | 2779 |
| RFL 308 | R0934F.300k_Assembly_Contig_175_1 | 1226 | 2780 |
| RFL 308 | Primepii.300k_Assembly_Contig_198_1 | 1227 | 2781 |
| RFL 309 | Wheat-Rye-6R.300k_Assembly_Contig_52_2 | 1228 | 2782 |
| RFL 309 | Primepii.300k_Assembly_Contig_194_1 | 1229 | 2783 |
| RFL 309 | R0932E.300k_Assembly_Contig_51_1 | 1230 | 2784 |
| RFL 309 | R0934F.300k_Assembly_Contig_191_2 | 1231 | 2785 |
| RFL 309 | R197.300k_Assembly_Contig_190_2 | 1232 | 2786 |
| RFL 310 | Triticum- | 1233 | 2787 |
| | timopheevii.300k_Assembly_Contig_19_1 | | |
| RFL 311 | Wheat-Rye-6R.300k_Assembly_Contig_123_1 | 1234 | 2788 |
| RFL 311 | Anapurna.300k_Assembly_Contig_118_1 | 1235 | 2789 |
| RFL 311 | R197.300k_Assembly_Contig_131_1 | 1236 | 2790 |
| RFL 311 | R0932E.300k_Assembly_Contig_128_1 | 1237 | 2791 |
| RFL 312 | Anapurna.300k_Assembly_Contig_146_1 | 1238 | 2792 |
| RFL 312 | R0932E.300k_Assembly_Contig_175_1 | 1239 | 2793 |
| RFL 312 | Wheat-Rye-6R.300k_Assembly_Contig_158_1 | 1240 | 2794 |
| RFL 312 | R197.300k_Assembly_Contig_155_1 | 1241 | 2795 |
| RFL 312 | R0934F.300k_Assembly_Contig_153_1 | 1242 | 2796 |
| RFL 312 | Primepii.300k_Assembly_Contig_145_1 | 1243 | 2797 |
| RFL 313 | R0934F.300k_Assembly_Contig_59_1 | 1244 | 2798 |
| RFL 313 | R0932E.300k_Assembly_Contig_69_1 | 1245 | 2799 |
| RFL 313 | Wheat-Rye-6R.300k_Assembly_Contig_47_1 | 1246 | 2800 |
| RFL 313 | Primepii.300k_Assembly_Contig_69_1 | 1247 | 2801 |
| RFL 313 | Anapurna.300k_Assembly_Contig_56_1 | 1248 | 2802 |
| RFL 313 | R197.300k_Assembly_Contig_91_1 | 1249 | 2803 |
| RFL 314 | Anapurna.300k_Assembly_Contig_143_2 | 1250 | 2804 |
| RFL 314 | R197.300k_Assembly_Contig_169_2 | 1251 | 2805 |
| RFL 314 | R0932E.300k_Assembly_Contig_150_2 | 1252 | 2806 |
| RFL 314 | Wheat-Rye-6R.300k_Assembly_Contig_148_2 | 1253 | 2807 |
| RFL 314 | Primepii.300k_Assembly_Contig_147_2 | 1254 | 2808 |
| RFL 314 | R0934F.300k_Assembly_Contig_148_2 | 1255 | 2809 |
| RFL 315 | R197.300k_Assembly_Contig_129_2 | 1256 | 2810 |
| RFL 315 | R0934F.300k_Assembly_Contig_120_2 | 1257 | 2811 |
| RFL 315 | Wheat-Rye-6R.300k_Assembly_Contig_118_2 | 1258 | 2812 |
| RFL 315 | Primepii.300k_Assembly_Contig_123_2 | 1259 | 2813 |
| RFL 315 | Anapurna.300k_Assembly_Contig_102_2 | 1260 | 2814 |
| RFL 315 | Triticum- | 1261 | 2815 |
| | timopheevii.300k_Assembly_Contig_79_2 | | |
| RFL 315 | R0932E.300k_Assembly_Contig_127_2 | 1262 | 2816 |
| RFL 316 | R197.300k_Assembly_Contig_208_2 | 1263 | 2817 |
| RFL 317 | R197.300k_Assembly_Contig_9_2 | 1264 | 2818 |
| RFL 317 | Anapurna.300k_Assembly_Contig_18_2 | 1265 | 2819 |
| RFL 317 | Primepii.300k_Assembly_Contig_5_2 | 1266 | 2820 |
| RFL 317 | R0934F.300k_Assembly_Contig_19_2 | 1267 | 2821 |
| RFL 317 | Wheat-Rye-6R.300k_Assembly_Contig_14_2 | 1268 | 2822 |
| RFL 317 | R0932E.300k_Assembly_Contig_16_2 | 1269 | 2823 |
| RFL 318 | Anapurna.300k_Assembly_Contig_57_1 | 1270 | 2824 |
| RFL 319 | Primepii.300k_Assembly_Contig_117_1 | 1271 | 2825 |
| RFL 319 | R0934F.300k_Assembly_Contig_123_1 | 1272 | 2826 |
| RFL 320 | R0932E.300k_Assembly_Contig_105_2 | 1273 | 2827 |
| RFL 320 | Wheat-Rye-6R.300k_Assembly_Contig_110_2 | 1274 | 2828 |
| RFL 320 | Anapurna.300k_Assembly_Contig_91_2 | 1275 | 2829 |
| RFL 320 | R197.300k_Assembly_Contig_87_2 | 1276 | 2830 |
| RFL 320 | R0934F.300k_Assembly_Contig_101_2 | 1277 | 2831 |
| RFL 320 | Primepii.300k_Assembly_Contig_98_2 | 1278 | 2832 |
| RFL 321 | R0934F.300k_Assembly_Contig_105_2 | 1279 | 2833 |
| RFL 321 | R0932E.300k_Assembly_Contig_84_2 | 1280 | 2834 |
| RFL 321 | Wheat-Rye-6R.300k_Assembly_Contig_89_2 | 1281 | 2835 |
| RFL 321 | R197.300k_Assembly_Contig_89_2 | 1282 | 2836 |
| RFL 321 | Primepii.300k_Assembly_Contig_78_2 | 1283 | 2837 |
| RFL 321 | Anapurna.300k_Assembly_Contig_65_2 | 1284 | 2838 |
| RFL 322 | R0934F.300k_Assembly_Contig_47_1 | 1285 | 2839 |
| RFL 322 | Primepii.300k_Assembly_Contig_15_1 | 1286 | 2840 |
| RFL 323 | R0932E.300k_Assembly_Contig_21_1 | 1287 | 2841 |
| RFL 323 | R0934F.300k_Assembly_Contig_25_1 | 1288 | 2842 |
| RFL 323 | R197.300k_Assembly_Contig_14_1 | 1289 | 2843 |
| RFL 323 | Anapurna.300k_Assembly_Contig_6_1 | 1290 | 2844 |
| RFL 323 | Primepii.300k_Assembly_Contig_20_1 | 1291 | 2845 |
| RFL 323 | Wheat-Rye-6R.300k_Assembly_Contig_8_1 | 1292 | 2846 |
| RFL 324 | Anapurna.300k_Assembly_Contig_178_1 | 1293 | 2847 |
| RFL 324 | Triticum- | 1294 | 2848 |
| | timopheevii.300k_Assembly_Contig_116_1 | | |
| RFL 324 | R197.300k_Assembly_Contig_193_1 | 1295 | 2849 |
| RFL 324 | R0932E.300k_Assembly_Contig_191_1 | 1296 | 2850 |
| RFL 324 | Wheat-Rye-6R.300k_Assembly_Contig_184_1 | 1297 | 2851 |
| RFL 324 | Primepii.300k_Assembly_Contig_186_1 | 1298 | 2852 |
| RFL 324 | R0934F.300k_Assembly_Contig_188_1 | 1299 | 2853 |
| RFL 325 | Primepii.300k_Assembly_Contig_74_1 | 1300 | 2854 |
| RFL 325 | R197.300k_Assembly_Contig_107_1 | 1301 | 2855 |
| RFL 325 | Wheat-Rye-6R.300k_Assembly_Contig_81_1 | 1302 | 2856 |
| RFL 325 | R0934F.300k_Assembly_Contig_88_1 | 1303 | 2857 |
| RFL 325 | R0932E.300k_Assembly_Contig_115_1 | 1304 | 2858 |
| RFL 325 | Anapurna.300k_Assembly_Contig_76_1 | 1305 | 2859 |
| RFL 326 | R0932E.300k_Assembly_Contig_77_1 | 1306 | 2860 |
| RFL 326 | Wheat-Rye-6R.300k_Assembly_Contig_75_1 | 1307 | 2861 |
| RFL 326 | R197.300k_Assembly_Contig_103_1 | 1308 | 2862 |
| RFL 326 | R0934F.300k_Assembly_Contig_72_1 | 1309 | 2863 |
| RFL 327 | Primepii.300k_Assembly_Contig_192_1 | 1310 | 2864 |
| RFL 327 | R197.300k_Assembly_Contig_1921 | 1311 | 2865 |
| RFL 327 | Wheat-Rye-6R.300k_Assembly_Contig_187_1 | 1312 | 2866 |
| RFL 327 | R0932E.300k_Assembly_Contig_190_1 | 1313 | 2867 |
| RFL 327 | R0934F.300k_Assembly_Contig_185_1 | 1314 | 2868 |
| RFL 327 | Anapurna.300k_Assembly_Contig_182_1 | 1315 | 2869 |
| RFL 328 | Primepii.300k_Assembly_Contig_95_1 | 1316 | 2870 |
| RFL 328 | R197.300k_Assembly_Contig_112_1 | 1317 | 2871 |
| RFL 328 | Wheat-Rye-6R.300k_Assembly_Contig_173_1 | 1318 | 2872 |
| RFL 329 | Triticum- | 1319 | 2873 |
| | timopheevii.300k_Assembly_Contig_88_2 | | |
| RFL 329 | Wheat-Rye-6R.300k_Assembly_Contig_124_1 | 1320 | 2874 |
| RFL 329 | Anapurna.300k_Assembly_Contig_115_1 | 1321 | 2875 |
| RFL 329 | Primepii.300k_Assembly_Contig_122_1 | 1322 | 2876 |
| RFL 329 | R197.300k_Assembly_Contig_130_1 | 1323 | 2877 |
| RFL 329 | R0934F.300k_Assembly_Contig_114_1 | 1324 | 2878 |
| RFL 330 | Wheat-Rye-6R.300k_Assembly_Contig_141_2 | 1325 | 2879 |
| RFL 330 | R197.300k_Assembly_Contig_146_2 | 1326 | 2880 |
| RFL 330 | Primepii.300k_Assembly_Contig_155_1 | 1327 | 2881 |
| RFL 330 | Anapurna.300k_Assembly_Contig_138_2 | 1328 | 2882 |
| RFL 330 | Triticum- | 1329 | 2883 |
| | timopheevii.300k_Assembly_Contig_92_1 | | |
| RFL 330 | R0934F.300k_Assembly_Contig_142_2 | 1330 | 2884 |
| RFL 330 | R0932E.300k_Assembly_Contig_146_2 | 1331 | 2885 |
| RFL 331 | R0932E.300k_Assembly_Contig_26_1 | 1332 | 2886 |
| RFL 331 | R197.300k_Assembly_Contig_41_1 | 1333 | 2887 |
| RFL 331 | R0934F.300k_Assembly_Contig_38_1 | 1334 | 2888 |
| RFL 331 | Wheat-Rye-6R.300k_Assembly_Contig_50_1 | 1335 | 2889 |
| RFL 331 | Primepii.300k_Assembly_Contig_45_1 | 1336 | 2890 |
| RFL 331 | Anapurna.300k_Assembly_Contig_45_1 | 1337 | 2891 |
| RFL 332 | Triticum- | 1338 | 2892 |
| | timopheevii.300k_Assembly_Contig_72_1 | | |
| RFL 333 | R0934F.300k_Assembly_Contig_53_2 | 1339 | 2893 |
| RFL 333 | Primepii.300k_Assembly_Contig_28_2 | 1340 | 2894 |
| RFL 333 | Wheat-Rye-6R.300k_Assembly_Contig_49_2 | 1341 | 2895 |
| RFL 333 | R0932E.300k_Assembly_Contig_14_2 | 1342 | 2896 |
| RFL 333 | R197.300k_Assembly_Contig_53_2 | 1343 | 2897 |
| RFL 333 | Anapurna.300k_Assembly_Contig_55_2 | 1344 | 2898 |
| RFL 334 | R197.300k_Assembly_Contig_208_1 | 1345 | 2899 |
| RFL 335 | Wheat-Rye-6R.300k_Assembly_Contig_112_1 | 1346 | 2900 |
| RFL 335 | R0934F.300k_Assembly_Contig_130_1 | 1347 | 2901 |
| RFL 335 | R0932E.300k_Assembly_Contig_111_1 | 1348 | 2902 |
| RFL 335 | Anapurna.300k_Assembly_Contig_88_1 | 1349 | 2903 |
| RFL 335 | R0932E.300k_Assembly_Contig_206_1 | 1350 | 2904 |
| RFL 336 | Triticum- | 1351 | 2905 |
| | timopheevii.300k_Assembly_Contig_18_1 | | |
| RFL 337 | R197.300k_Assembly_Contig_184_1 | 1352 | 2906 |
| RFL 337 | Triticum- | 1353 | 2907 |
| | timopheevii.300k_Assembly_Contig_115_1 | | |
| RFL 337 | R0932E.300k_Assembly_Contig_188_1 | 1354 | 2908 |
| RFL 337 | Primepii.300k_Assembly_Contig_185_1 | 1355 | 2909 |
| RFL 337 | R0934F.300k_Assembly_Contig_186_1 | 1356 | 2910 |
| RFL 337 | Anapurna.300k_Assembly_Contig_173_1 | 1357 | 2911 |
| RFL 337 | Wheat-Rye-6R.300k_Assembly_Contig_182_1 | 1358 | 2912 |
| RFL 338 | Primepii.300k_Assembly_Contig_111_1 | 1359 | 2913 |
| RFL 339 | Anapurna.300k_Assembly_Contig_36_2 | 1360 | 2914 |
| RFL 339 | Wheat-Rye-6R.300k_Assembly_Contig_43_2 | 1361 | 2915 |
| RFL 339 | R0934F.300k_Assembly_Contig_35_2 | 1362 | 2916 |
| RFL 339 | R197.300k_Assembly_Contig_2_5 | 1363 | 2917 |
| RFL 339 | R0932E.300k_Assembly_Contig_49_2 | 1364 | 2918 |
| RFL 339 | Primepii.300k_Assembly_Contig_32_2 | 1365 | 2919 |
| RFL 340 | Triticum- | 1366 | 2920 |
| | timopheevii.300k_Assembly_Contig_91_1 | | |
| RFL 341 | R0932E.300k_Assembly_Contig_118_1 | 1367 | 2921 |
| RFL 341 | R197.300k_Assembly_Contig_104_1 | 1368 | 2922 |
| RFL 341 | Anapurna.300k_Assembly_Contig_97_1 | 1369 | 2923 |
| RFL 341 | Wheat-Rye-6R.300k_Assembly_Contig_94_1 | 1370 | 2924 |
| RFL 342 | Triticum- | 1371 | 2925 |
| | timopheevii.300k_Assembly_Contig_11_1 | | |
| RFL 343 | Primepii.300k_Assembly_Contig_179_1 | 1372 | 2926 |
| RFL 344 | Triticum- | 1373 | 2927 |
| | timopheevii.300k_Assembly_Contig_128_1 | | |
| RFL 345 | R0932E.300k_Assembly_Contig_120_1 | 1374 | 2928 |
| RFL 346 | Wheat-Rye-6R.300k_Assembly_Contig_142_1 | 1375 | 2929 |
| RFL 346 | R197.300k_Assembly_Contig_153_1 | 1376 | 2930 |
| RFL 346 | Primepii.300k_Assembly_Contig_158_1 | 1377 | 2931 |
| RFL 346 | Anapurna.300k_Assembly_Contig_154_1 | 1378 | 2932 |
| RFL 347 | Anapurna.300k_Assembly_Contig_9_2 | 1379 | 2933 |
| RFL 347 | R0932E.300k_Assembly_Contig_10_2 | 1380 | 2934 |
| RFL 347 | R0934F.300k_Assembly_Contig_21_2 | 1381 | 2935 |
| RFL 347 | Primepii.300k_Assembly_Contig_48_2 | 1382 | 2936 |
| RFL 347 | R197.300k_Assembly_Contig_2_2 | 1383 | 2937 |
| RFL 347 | Wheat-Rye-6R.300k_Assembly_Contig_20_2 | 1384 | 2938 |
| RFL 348 | Triticum- | 1385 | 2939 |
| | timopheevii.300k_Assembly_Contig_58_2 | | |
| RFL 349 | Primepii.300k_Assembly_Contig_45_2 | 1386 | 2940 |
| RFL 349 | R197.300k_Assembly_Contig_41_2 | 1387 | 2941 |
| RFL 349 | R0932E.300k_Assembly_Contig_26_2 | 1388 | 2942 |
| RFL 349 | R0934F.300k_Assembly_Contig_38_2 | 1389 | 2943 |
| RFL 349 | Anapurna.300k_Assembly_Contig_45_2 | 1390 | 2944 |
| RFL 349 | Wheat-Rye-6R.300k_Assembly_Contig_50_2 | 1391 | 2945 |
| RFL 350 | Anapurna.300k_Assembly_Contig_177_1 | 1392 | 2946 |
| RFL 350 | R0934F.300k_Assembly_Contig_184_1 | 1393 | 2947 |
| RFL 350 | R0932E.300k_Assembly_Contig_186_1 | 1394 | 2948 |
| RFL 350 | R197.300k_Assembly_Contig_187_1 | 1395 | 2949 |
| RFL 350 | Wheat-Rye-6R.300k_Assembly_Contig_181_1 | 1396 | 2950 |
| RFL 351 | R0934F.300k_Assembly_Contig_93_1 | 1397 | 2951 |
| RFL 351 | Primepii.300k_Assembly_Contig_88_1 | 1398 | 2952 |
| RFL 352 | Triticum- | 1399 | 2953 |
| | timopheevii.300k_Assembly_Contig_68_1 | | |
| RFL 353 | R197.300k_Assembly_Contig_138_2 | 1400 | 2954 |
| RFL 353 | Wheat-Rye-6R.300k_Assembly_Contig_122_2 | 1401 | 2955 |
| RFL 353 | Anapurna.300k_Assembly_Contig_119_2 | 1402 | 2956 |
| RFL 353 | Primepii.300k_Assembly_Contig_131_2 | 1403 | 2957 |
| RFL 353 | R0932E.300k_Assembly_Contig_131_2 | 1404 | 2958 |
| RFL 353 | R0934F.300k_Assembly_Contig_113_2 | 1405 | 2959 |
| RFL 354 | R0932E.300k_Assembly_Contig_106_1 | 1406 | 2960 |
| RFL 354 | Anapurna.300k_Assembly_Contig_81_1 | 1407 | 2961 |
| RFL 354 | R197.300k_Assembly_Contig_88_1 | 1408 | 2962 |
| RFL 354 | Wheat-Rye-6R.300k_Assembly_Contig_114_1 | 1409 | 2963 |
| RFL 354 | R0934F.300k_Assembly_Contig_112_1 | 1410 | 2964 |
| RFL 354 | Primepii.300k_Assembly_Contig_103_1 | 1411 | 2965 |
| RFL 355 | Anapurna.300k_Assembly_Contig_133_1 | 1412 | 2966 |
| RFL 356 | Triticum- | 1413 | 2967 |
| | timopheevii.300k_Assembly_Contig_91_2 | | |
| RFL 357 | Wheat-Rye-6R.300k_Assembly_Contig_56_1 | 1414 | 2968 |
| RFL 357 | Anapurna.300k_Assembly_Contig_60_2 | 1415 | 2969 |
| RFL 357 | Primepii.300k_Assembly_Contig_56_2 | 1416 | 2970 |
| RFL 357 | R0934F.300k_Assembly_Contig_60_1 | 1417 | 2971 |
| RFL 357 | R0932E.300k_Assembly_Contig_2_1 | 1418 | 2972 |
| RFL 357 | R197.300k_Assembly_Contig_60_1 | 1419 | 2973 |
| RFL 358 | R0934F.300k_Assembly_Contig_193_1 | 1420 | 2974 |
| RFL 358 | Wheat-Rye-6R.300k_Assembly_Contig_188_1 | 1421 | 2975 |
| RFL 358 | R197.300k_Assembly_Contig_197_1 | 1422 | 2976 |
| RFL 358 | Primepii.300k_Assembly_Contig_190_1 | 1423 | 2977 |
| RFL 358 | R0932E.300k_Assembly_Contig_194_1 | 1424 | 2978 |
| RFL 358 | Anapurna.300k_Assembly_Contig_184_1 | 1425 | 2979 |
| RFL 359 | Primepii.300k_Assembly_Contig_210_1 | 1426 | 2980 |
| RFL 359 | R0934F.300k_Assembly_Contig_208_1 | 1427 | 2981 |
| RFL 360 | Wheat-Rye-6R.300k_Assembly_Contig_153_1 | 1428 | 2982 |
| RFL 360 | R197.300k_Assembly_Contig_160_1 | 1429 | 2983 |
| RFL 361 | Wheat-Rye-6R.300k_Assembly_Contig_97_2 | 1430 | 2984 |
| RFL 361 | Primepii.300k_Assembly_Contig_91_2 | 1431 | 2985 |
| RFL 361 | R0932E.300k_Assembly_Contig_110_2 | 1432 | 2986 |
| RFL 361 | R0934F.300k_Assembly_Contig_86_2 | 1433 | 2987 |
| RFL 361 | Anapurna.300k_Assembly_Contig_101_2 | 1434 | 2988 |
| RFL 361 | R197.300k_Assembly_Contig_108_2 | 1435 | 2989 |
| RFL 362 | Triticum- | 1436 | 2990 |
| | timopheevii.300k_Assembly_Contig_61_1 | | |
| RFL 363 | R0932E.300k_Assembly_Contig_31_1 | 1437 | 2991 |
| RFL 363 | R197.300k_Assembly_Contig_49_1 | 1438 | 2992 |
| RFL 363 | R0934F.300k_Assembly_Contig_41_1 | 1439 | 2993 |
| RFL 363 | Anapurna.300k_Assembly_Contig_40_1 | 1440 | 2994 |
| RFL 363 | Wheat-Rye-6R.300k_Assembly_Contig_27_1 | 1441 | 2995 |
| RFL 363 | Primepii.300k_Assembly_Contig_65_1 | 1442 | 2996 |
| RFL 364 | Wheat-Rye-6R.300k_Assembly_Contig_141_3 | 1443 | 2997 |
| RFL 364 | R197.300k_Assembly_Contig_146_3 | 1444 | 2998 |
| RFL 364 | Triticum- | 1445 | 2999 |
| | timopheevii.300k_Assembly_Contig_92_2 | | |
| RFL 364 | Anapurna.300k_Assembly_Contig_138_3 | 1446 | 3000 |
| RFL 364 | R0934F.300k_Assembly_Contig_142_3 | 1447 | 3001 |
| RFL 364 | R0932E.300k_Assembly_Contig_146_3 | 1448 | 3002 |
| RFL 364 | Primepii.300k_Assembly_Contig_155_2 | 1449 | 3003 |
| RFL 365 | R0934F.300k_Assembly_Contig_5_3 | 1450 | 3004 |
| RFL 365 | Primepii.300k_Assembly_Contig_17_2 | 1451 | 3005 |
| RFL 365 | R197.300k_Assembly_Contig_5_2 | 1452 | 3006 |
| RFL 366 | Wheat-Rye-6R.300k_Assembly_Contig_144_1 | 1453 | 3007 |
| RFL 366 | Anapurna.300k_Assembly_Contig_148_1 | 1454 | 3008 |
| RFL 366 | Primepii.300k_Assembly_Contig_142_1 | 1455 | 3009 |
| RFL 366 | R0932E.300k_Assembly_Contig_147_1 | 1456 | 3010 |
| RFL 366 | R197.300k_Assembly_Contig_170_1 | 1457 | 3011 |
| RFL 366 | R0934F.300k_Assembly_Contig_168_1 | 1458 | 3012 |
| RFL 367 | R197.300k_Assembly_Contig_138_1 | 1459 | 3013 |
| RFL 367 | Wheat-Rye-6R.300k_Assembly_Contig_122_1 | 1460 | 3014 |
| RFL 367 | Anapurna.300k_Assembly_Contig_119_1 | 1461 | 3015 |
| RFL 367 | R0932E.300k_Assembly_Contig_131_1 | 1462 | 3016 |
| RFL 367 | Primepii.300k_Assembly_Contig_131_1 | 1463 | 3017 |
| RFL 367 | R0934F.300k_Assembly_Contig_113_1 | 1464 | 3018 |
| RFL 368 | R0932E.300k_Assembly_Contig_63_2 | 1465 | 3019 |
| RFL 368 | R197.300k_Assembly_Contig_35_2 | 1466 | 3020 |
| RFL 368 | Anapurna.300k_Assembly_Contig_170_2 | 1467 | 3021 |
| RFL 368 | Wheat-Rye-6R.300k_Assembly_Contig_61_2 | 1468 | 3022 |
| RFL 369 | Anapurna.300k_Assembly_Contig_159_1 | 1469 | 3023 |
| RFL 369 | R0932E.300k_Assembly_Contig_162_1 | 1470 | 3024 |
| RFL 369 | R197.300k_Assembly_Contig_165_1 | 1471 | 3025 |
| RFL 369 | Wheat-Rye-6R.300k_Assembly_Contig_138_1 | 1472 | 3026 |
| RFL 369 | R0934F.300k_Assembly_Contig_164_1 | 1473 | 3027 |
| RFL 369 | Primepii.300k_Assembly_Contig_168_1 | 1474 | 3028 |
| RFL 370 | R0932E.300k_Assembly_Contig_28_1 | 1475 | 3029 |
| RFL 370 | Primepii.300k_Assembly_Contig_26_1 | 1476 | 3030 |
| RFL 370 | Anapurna.300k_Assembly_Contig_7_1 | 1477 | 3031 |
| RFL 371 | Anapurna.300k_Assembly_Contig_117_1 | 1478 | 3032 |
| RFL 371 | R0932E.300k_Assembly_Contig_154_1 | 1479 | 3033 |
| RFL 371 | Primepii.300k_Assembly_Contig_134_1 | 1480 | 3034 |
| RFL 372 | R0932E.300k_Assembly_Contig_131_3 | 1481 | 3035 |
| RFL 372 | R0934F.300k_Assembly_Contig_113_3 | 1482 | 3036 |
| RFL 373 | Primepii.300k_Assembly_Contig_211_1 | 1483 | 3037 |
| RFL 373 | R197.300k_Assembly_Contig_206_1 | 1484 | 3038 |
| RFL 373 | R0934F.300k_Assembly_Contig_205_1 | 1485 | 3039 |
| RFL 374 | Triticum- | 1486 | 3040 |
| | timopheevii.300k_Assembly_Contig_103_2 | | |
| RFL 375 | R0932E.300k_Assembly_Contig_42_2 | 1487 | 3041 |
| RFL 375 | Anapurna.300k_Assembly_Contig_46_2 | 1488 | 3042 |
| RFL 375 | R197.300k_Assembly_Contig_147_2 | 1489 | 3043 |
| RFL 375 | Wheat-Rye-6R.300k_Assembly_Contig_18_2 | 1490 | 3044 |
| RFL 376 | R0932E.300k_Assembly_Contig_119_3 | 1491 | 3045 |
| RFL 376 | R197.300k_Assembly_Contig_122_3 | 1492 | 3046 |
| RFL 376 | R0934F.300k_Assembly_Contig_108_3 | 1493 | 3047 |
| RFL 376 | Wheat-Rye-6R.300k_Assembly_Contig_116_3 | 1494 | 3048 |
| RFL 376 | Anapurna.300k_Assembly_Contig_103_3 | 1495 | 3049 |
| RFL 376 | Primepii.300k_Assembly_Contig_101_3 | 1496 | 3050 |
| RFL 377 | R0932E.300k_Assembly_Contig_74_2 | 1497 | 3051 |
| RFL 378 | R197.300k_Assembly_Contig_202_1 | 1498 | 3052 |
| RFL 378 | R0932E.300k_Assembly_Contig_197_1 | 1499 | 3053 |
| RFL 378 | Wheat-Rye-6R.300k_Assembly_Contig_196_1 | 1500 | 3054 |
| RFL 378 | Anapurna.300k_Assembly_Contig_187_1 | 1501 | 3055 |
| RFL 378 | R0934F.300k_Assembly_Contig_199_1 | 1502 | 3056 |
| RFL 378 | Primepii.300k_Assembly_Contig_205_1 | 1503 | 3057 |
| RFL 379 | Primepii.300k_Assembly_Contig_223_1 | 1504 | 3058 |
| RFL 379 | Wheat-Rye-6R.300k_Assembly_Contig_179_1 | 1505 | 3059 |
| RFL 379 | Anapurna.300k_Assembly_Contig_193_1 | 1506 | 3060 |
| RFL 379 | R0932E.300k_Assembly_Contig_178_1 | 1507 | 3061 |
| RFL 380 | Triticum- | 1508 | 3062 |
| | timopheevii.300k_Assembly_Contig_85_1 | | |
| RFL 381 | R197.300k_Assembly_Contig_169_1 | 1509 | 3063 |
| RFL 381 | Wheat-Rye-6R.300k_Assembly_Contig_148_1 | 1510 | 3064 |
| RFL 381 | R0932E.300k_Assembly_Contig_150_1 | 1511 | 3065 |
| RFL 381 | Primepii.300k_Assembly_Contig_147_1 | 1512 | 3066 |
| RFL 381 | R0934F.300k_Assembly_Contig_148_1 | 1513 | 3067 |
| RFL 381 | Anapurna.300k_Assembly_Contig_143_1 | 1514 | 3068 |
| RFL 382 | Triticum- | 1515 | 3069 |
| | timopheevii.300k_Assembly_Contig_109_1 | | |
| RFL 383 | Wheat-Rye-6R.300k_Assembly_Contig_111_1 | 1516 | 3070 |
| RFL 383 | R197.300k_Assembly_Contig_121_1 | 1517 | 3071 |
| RFL 383 | Primepii.300k_Assembly_Contig_113_1 | 1518 | 3072 |
| RFL 384 | Triticum- | 1519 | 3073 |
| | timopheevii.300k_Assembly_Contig_117_1 | | |
| RFL 385 | Anapurna.300k_Assembly_Contig_167_1 | 1520 | 3074 |
| RFL 385 | R0932E.300k_Assembly_Contig_182_1 | 1521 | 3075 |
| RFL 385 | Wheat-Rye-6R.300k_Assembly_Contig_175_1 | 1522 | 3076 |
| RFL 385 | R0934F.300k_Assembly_Contig_172_1 | 1523 | 3077 |
| RFL 385 | Primepii.300k_Assembly_Contig_170_1 | 1524 | 3078 |
| RFL 385 | R197.300k_Assembly_Contig_175_1 | 1525 | 3079 |
| RFL 386 | Primepii.300k_Assembly_Contig_105_1 | 1526 | 3080 |
| RFL 386 | R0934F.300k_Assembly_Contig_56_1 | 1527 | 3081 |
| RFL 387 | Primepii.300k_Assembly_Contig_159_2 | 1528 | 3082 |
| RFL 388 | Wheat-Rye-6R.300k_Assembly_Contig_175_2 | 1529 | 3083 |
| RFL 388 | Anapurna.300k_Assembly_Contig_167_2 | 1530 | 3084 |
| RFL 388 | R0934F.300k_Assembly_Contig_172_2 | 1531 | 3085 |
| RFL 388 | Primepii.300k_Assembly_Contig_170_2 | 1532 | 3086 |
| RFL 388 | R0932E.300k_Assembly_Contig_182_2 | 1533 | 3087 |
| RFL 388 | R197.300k_Assembly_Contig_175_2 | 1534 | 3088 |
| RFL 389 | R0934F.300k_Assembly_Contig_74_1 | 1535 | 3089 |
| RFL 389 | Anapurna.300k_Assembly_Contig_64_1 | 1536 | 3090 |
| RFL 389 | Wheat-Rye-6R.300k_Assembly_Contig_70_1 | 1537 | 3091 |
| RFL 389 | Primepii.300k_Assembly_Contig_79_1 | 1538 | 3092 |
| RFL 390 | Wheat-Rye-6R.300k_Assembly_Contig_217_1 | 1539 | 3093 |
| RFL 390 | Anapurna.300k_Assembly_Contig_203_1 | 1540 | 3094 |
| RFL 391 | R197.300k_Assembly_Contig_159_2 | 1541 | 3095 |
| RFL 391 | Wheat-Rye-6R.300k_Assembly_Contig_146_2 | 1542 | 3096 |
| RFL 391 | Primepii.300k_Assembly_Contig_154_2 | 1543 | 3097 |
| RFL 391 | R0934F.300k_Assembly_Contig_144_2 | 1544 | 3098 |
| RFL 391 | Anapurna.300k_Assembly_Contig_152_2 | 1545 | 3099 |
| RFL 391 | R0932E.300k_Assembly_Contig_149_2 | 1546 | 3100 |
| RFL 392 | R0934F.300k_Assembly_Contig_118_2 | 1547 | 3101 |
| RFL 392 | Triticum- | 1548 | 3102 |
| | timopheevii.300k_Assembly_Contig_82_2 | | |
| RFL 393 | Primepii.300k_Assembly_Contig_115_3 | 1549 | 3103 |
| RFL 393 | Wheat-Rye-6R.300k_Assembly_Contig_108_3 | 1550 | 3104 |
| RFL 394 | R0934F.300k_Assembly_Contig_222_1 | 1551 | 3105 |
| RFL 395 | Primepii.300k_Assembly_Contig_159_1 | 1552 | 3106 |
| RFL 396 | Triticum- | 1553 | 3107 |
| | timopheevii.300k_Assembly_Contig_58_1 | | |
| RFL 397 | Triticum- | 1554 | 3133 |
| | timopheevii.300k_Assembly_Contig_46_2 | | |

### Example 3: Mapping of the Genes Encoding Candidate Rf Proteins in the Chromosomal Intervals Associated with Fertility Restoration

### A. Fine-Mapping of the Genomic Region Containing Rf1 Genetic Determinants

[0332] Three F2 mapping populations segregating for Rf1 (R197×Kalahari, R204×Alixan and R0932E×Altigo) encompassing 210, 218 and 212 individuals respectively were phenotyped and genotyped with 18100 SNP markers using Limagrain's internal genotyping platform.

[0333] Fertility tests were conducted indoors under controlled growth conditions, either in growth chambers or in greenhouses, enabling normal fertility of the tested wheat plants. The fertility scores indicated have been calculated by dividing the total number of seeds threshed from a spike by the number of counted spikelets. The t-tests conducted were done by comparing the fertility scores of F1s made with a restorer and the fertility scores of a panel of elite inbred lines grown under the same conditions.

[0334] Rf1 was first mapped on the short arm of the chromosome 1A between 4 cM and 10.9 cM on Limagrain's internal consensus map and physically delimited by SNP markers cfn1087371 and cfn0530841. These two SNP markers delimit the largest possible interval defined by the three mapping populations.

[0335] Subsequently, joint analysis of the three mapping populations and phenotyping of the individual F2 recombinant plants on derived F3 families validated the QTL position and delimited the Rf1 interval between 7 cM and 8.9 cM on Limagrain's internal consensus map and physically delimited by SNP markers cfn1082074 and cfn0523990. We used the genomic resources of the IWGSC Whole genome assembly, ‘IWGSC WGA’ (available from June 2016 from the URGI IWGSC repository) to anchor the locus to the wheat genome reference physical map. The left border (cfn1082074) was anchored on the IWGSCWGAV02_1AS_scaffold44309 scaffold and the right border (cfn0523990) was anchored on the IWGSCWGAV02_1AS_scaffold47238 scaffold.

[0336] Next, the locus was fine-mapped by screening 2976 and 3072 F3 lines from R197×Kalahari and R204×Alixan derived from F2 plants heterozygous at the locus. Phenotyping and analysis of recombinant plant progenies within the interval redefined a smaller mapping interval between 7.5 and 8.8 cM delimited by cfn0522096 and cfn0527067 SNP markers on the IWGSCWGAV02_1AS_scaffold44309 scaffold and the IWGSCWGAV02_1AS_scaffold47238 scaffold, respectively.

### B. Fine-Mapping of the Genomic Region Containing Rf3 Genetic Determinants

[0337] Three F2 mapping populations (TJB155×Anapurna, 2852×Altamira, and AH46×R0946E) encompassing 217, 135, and 246 individuals respectively and a doubled-haploid (DH) population (H46×R934F) consisting of 140 individual plants segregating for Rf3 were phenotyped as described in example 1, and genotyped with 18100 SNP markers using Limagrain's internal genotyping platform. Rf3 was first mapped on the short arm of the chromosome 1B between 18.9 cM and 24.2 cM on Limagrain's internal consensus map and physically delimited by SNP markers cfn0554333 and cfn0560679. These two SNP markers delimit the largest possible interval defined by the four mapping populations.

[0338] Subsequently, joint analysis of the four mapping populations and validation of the phenotype of the individual F2/DH recombinant plants on derived F3 families validated the QTL, genetically delimited the locus between 22.2 cM and 22.7 cM on Limagrain's internal consensus map, and physically delimited the Rf3 interval between SNP markers cfn0436720 and cfn0238384. We used the genomic resources of the IWGSC Whole genome assembly, ‘IWGSC WGA’ (available from June 2016 from the URGI IWGSC repository) to anchor the locus to the physical map. The left border (cfn0436720) was anchored on the IWGSCWGAV02_1BS_scaffold35219 scaffold and the right border (cfn0238384) was anchored on the IWGSCWGAV02_1BS_scaffold5117 scaffold.

[0339] Next, the locus was fine-mapped by screening 2496 and 672 plants from TJB155×Anapurna and AH46×R0946E F2 plants heterozygous at the locus. Analysis of recombinant F3 plant progenies within the interval redefined a smaller mapping interval between 22.5 and 22.7 cM delimited by cfn1249269 and BS00090770 SNP markers on the IWGSCWGAV02_1BS_scaffold35219 scaffold and the IWGSCWGAV02_1BS_scaffold5117 scaffold, respectively.

### C. Mapping of the Genomic Region Containing Rf7 Genetic Determinants

[0340] We crossed R197 and Primepii and then derived a population of 176 plants from individuals that were rf1 and rf3, i.e. not carrying the restorer alleles at the loci Rf1 and Rf3. The plants were genotyped with 18100 SNP markers using Limagrain's internal genotyping platform and phenotyped as described in example 1. We mapped the Rf7 locus on chromosome 7BL. Moreover, internal genotyping data showing a strong genetic divergence suggests the presence of an exotic chromosomal fragment which is stably transmitted through generations. We identified a large QTL ranging from 45 cM to 88 cM on chromosome 7B on Limagrain's internal consensus map with a peak on 46.7 cM (cfn0919993 with LOD score of 3.37E-40). Initial analysis of the recombinant plants suggests the Rf7 gene could be located between cfn3407185 and W90K_RAC875_c33564_120 markers delimiting a mapping interval of 0.3 cM between 46.7 cM and 47 cM on Limagrain's internal consensus map.

### Example 4: Identification of Candidate Orthologous RFL Groups

[0341] For each of the 282 RFL groups identified in example 2, the captured RFL ORFs (in the following referred to as protein sequences) were identified and the total number of RFL protein sequences is reported for each accession (Table 7, Table 8).

[0342] Only the following RFL clusters will be taken into consideration:
[0343] 1. RFL cluster contains protein representatives for all seven accessions and the sequences show polymorphism and/or length differences.
[0344] 2. RFL cluster contains representatives for only these accessions for which genetic characterization indicated that they may contain the same Rf gene or genes.

[0345] Tables 8A, 9A, 10 and 11 show the lists of the orthologous RFL groups correlating respectively with Rf1, Rf3, Rf7 and Rf-Rye-6R genes after the first screen. T. timopheevii is known to be fertile and, as a consequence, to restore T-CMS. This line is added here as it could contain any of the target Rf1, Rf3, Rf7 or Rf-rye genes.

[0346] Finally, only the orthologous RFL groups mapping in the chromosomal interval in wheat Triticum aestivum Chinese Spring reference genome are considered as candidates for further analyses. These orthologous RFL groups will be selected as “candidate Rf groups”.

[0347] Mapping was achieved using the tool tblastn from the BLAST+ Suite (https://blast.ncbi.nlm.nih.gov/Blast.cgi?PAGE_TYPE=BlastDocs&DOC_TYPE=Dow nload). Specific parameters (-evalue 1e-25 -best_hit_score_edge 0.05 -best_hit_overhang 0.25) were used in order to keep all best hits.

### A. Results for Rf1 Accessions:

[0348] Table 8A shows the orthologous RFL groups comprising at least one sequence captured from an accession characterized as bearing the Rf1 gene (R197, R0932E and T. timopheevii). The mapping described in example 3 allows us to discard orthologous RFL groups mapped outside of the chromosomal interval genetically associated with Rf1 fertility on the short arm of chromosome 1A. In this way, four RFLs clusters (79, 104, 185 and 268) were identified as potentially corresponding to the Rf protein encoded by the Rf1 gene.

[0349] All protein sequences from group RFL185 contain ˜500 amino acids and only 8.5 PPR motifs. Typically, full-length functional RFL proteins are expected to contain 15-20 PPR motifs. In addition, the last PPR motif of RFL185 is composed of only 15 amino acids. This indicates that RFL185 is truncated. RFL268 is also truncated (382 amino acids). Detailed sequence analysis has shown that RFL185 and RFL268 are remnants of the same gene that was split by a frameshift. Thus, both proteins are unlikely to be functional.

[0350] Hence RFL79 and RFL104 are considered as being the best candidate Rf groups for Rf1.

TABLE 8A
Selection of RFL based on accession CMS information for Rf1.

| | | | | | | | | Mapping |
|---|---|---|---|---|---|---|---|---|
| | | | | | | Restorer from Rye | Restorer | Positionned |
| CMS genotype | MAINTAINER | Rf3 | Rf1 + Rf7 | Rf1 | Rf3 | introgression | Triticum | in Rf1 mapping |
| RFLGene | ANAPURNA | PRIMEPII | R197 | R0932E | R0934F | Wheat-Rye-6R | timopheevii | interval |
| RFL1 | 0 | 0 | 1 | 1 | 0 | 0 | 0 | NO |
| RFL56 | 0 | 0 | 1 | 1 | 0 | 0 | 1 | NO |
| RFL59 | 0 | 0 | 1 | 2 | 0 | 0 | 1 | NO |
| RFL73 | 0 | 0 | 1 | 1 | 0 | 0 | 1 | NO |
| RFL74 | 0 | 0 | 3 | 4 | 3 | 0 | 0 | NO |
| RFL79 | 0 | 0 | 1 | 1 | 1 | 0 | 1 | YES |
| RFL93 | 0 | 0 | 1 | 1 | 0 | 0 | 0 | NO |
| RFL104 | 0 | 0 | 1 | 1 | 1 | 0 | 1 | YES |
| RFL129 | 0 | 0 | 1 | 1 | 1 | 0 | 0 | NO |
| RFL185 | 0 | 0 | 1 | 1 | 1 | 0 | 1 | YES |
| RFL268 | 0 | 0 | 1 | 1 | 1 | 0 | 1 | YES |

[0351] It can be noted from Table 8A that the only accession lacking Rf1 containing sequences in these candidate Rf groups is the accession R0934F.

TABLE 8B
presents the proteins in the candidate Rf groups 79 and 104.

| RFL | Cluster | | |
|---|---|---|---|
| 79 | 79 | length | ORF name |
| 0 | 0 | 808aa | R197.300k_Assembly_Contig_120_1 |
| 1 | 1 | 808aa | R0932E.300k_Assembly_Contig_103_1 |
| 2 | 2 | 808aa | R0934F.300k_Assembly_Contig_80_1 |
| 3 | 3 | 808aa | Triticum- |
| | | | timopheevii.300k_Assembly_Contig_57_1 |
| RFL | Cluster | | |
| 104 | 104 | length | ORF name |
| 0 | 0 | 757aa | R197.300k_Assembly_Contig_72_1 |
| 1 | 1 | 757aa | R0932E.300k_Assembly_Contig_82_1 |
| 2 | 2 | 757aa | R0934F.300k_Assembly_Contig_69_1 |
| 3 | 3 | 757aa | Triticum |
| | | | timopheevii.300k_Assembly_Contig_35_1 |

[0352] The DNA sequences derived from the contigs identified in example 2 and encoding RFL proteins from candidate Rf groups 79 and 104 were aligned with BWA-MEM software (Li H. and Durbin R., 2010). It was observed that these sequences differ in the 5′ UTR region in R0934F compared to R0932E and R197. One hypothesis is that the DNA sequences in R0934F were generated by a recombination event between the DNA sequences from candidate Rf groups 79 and 104. This recombined sequence may not be functional in R0934F as this line is only known to carry Rf3.

### B. Results for Rf3 Accessions:

[0353] The same rationale as for the Rf1 accessions was applied to the accessions (Primepii and R0934F) characterized as carrying the Rf3 gene. Table 9A shows that orthologous RFL groups 67, 89, 140, 166 and 252 are candidate Rf groups for the Rf protein encoded by Rf3 as they contain proteins identified in Primepii and R0934, the two accessions characterized as carrying Rf3 restorer gene and are located in the mapped genetic interval on the short arm on chromosome 1B.

TABLE 9A
selection of RFL clusters based on germplasm CMS information for Rf3

| | | | | | | | | Mapping |
|---|---|---|---|---|---|---|---|---|
| | | | | | | Restorer from Rye | Restorer | Positionned |
| CMS genotype | MAINTAINER | Rf3 | Rf1 + Rf7 | Rf1 | Rf3 | introgression | Triticum | in Rf3 mapping |
| RFLGene | ANAPURNA | PRIMEPII | R197 | R0932E | R0934F | Wheat-Rye-6R | timopheevii | interval |
| RFL22 | 0 | 1 | 0 | 0 | 1 | 0 | 0 | NO |
| RFL67 | 0 | 4 | 0 | 0 | 3 | 0 | 0 | YES* |
| RFL89 | 0 | 2 | 0 | 0 | 1 | 0 | 0 | YES |
| RFL140 | 0 | 1 | 0 | 0 | 1 | 0 | 0 | YES |
| RFL142 | 0 | 1 | 0 | 0 | 1 | 0 | 0 | NO |
| RFL164 | 0 | 1 | 0 | 0 | 1 | 0 | 0 | NO |
| RFL166 | 0 | 1 | 0 | 0 | 1 | 0 | 0 | YES |
| RFL227 | 0 | 1 | 0 | 0 | 1 | 0 | 0 | NO |
| RFL252 | 0 | 1 | 0 | 0 | 1 | 0 | 0 | YES |

[0354] In order to achieve an exhaustive analysis for selection of Rf3 candidates, all 282 RFL clusters were carefully analyzed with regard to number of RFLs, their length and their origin in relation to Rf3 genotype information. RFL clusters composed of RFL sequences from multiple accessions were screened for full-length protein sequences originating only from Primepii and R0934F genotypes and partial/shorter sequences from the non-Rf3-carrying genotypes. This analysis allowed the identification of four additional Rf3-candidate RFL clusters: RFL28, RFL29, RFL60 and RFL170.

TABLE 9B
details of the proteins present in RFL cluster 28, 29, 60 and
170 including protein length (aa = amino acids) and name.

| | Cluster | | |
|---|---|---|---|
| RFL 28 | 28 | Rf3 | |
| 0 | 0 | 323aa | Anapurna.300k_Assembly_Contig_2_3 |
| 1 | 1 | 479aa | Anapurna.300k_Assembly_Contig_2_2 |
| 2 | 2 | 857aa | Primepii.300k_Assembly_Contig_13_1 |
| 3 | 3 | 323aa | R197.300k_Assembly_Contig_10_3 |
| 4 | 4 | 479aa | R197.300k_Assembly_Contig_10_2 |
| 5 | 5 | 479aa | R0932E.300k_Assembly_Contig_23_2 |
| 6 | 6 | 323aa | R0932E.300k_Assembly_Contig_23_3 |
| 7 | 7 | 857aa | R0934F.300k_Assembly_Contig_17_1 |
| 8 | 8 | 323aa | Wheat-Rye- |
| | | | 6R.300k_Assembly_Contig_7_3 |
| 9 | 9 | 479aa | Wheat-Rye- |
| | | | 6R.300k_Assembly_Contig_7_2 |
| | Cluster | | |
| RFL 29 | 29 | Rf3 | |
| 0 | 0 | 828aa | Primepii.300k_Assembly_Contig_67_1 |
| 1 | 1 | 828aa | R0934F.300k_Assembly_Contig_78_1 |
| 3 | 2 | 536aa | Wheat-Rye- |
| | | | 6R.300k_Assembly_Contig_77_2 |
| 4 | 3 | 295aa | Wheat-Rye- |
| | | | 6R.300k_Assembly_Contig_77_1 |
| | Cluster | | |
| RFL 60 | 60 | Rf3 | |
| 0 | 0 | 828aa | Primepii.300k_Assembly_Contig_94_1 |
| 1 | 1 | 287aa | R197.300k_Assembly_Contig_95_1 |
| 2 | 2 | 828aa | R0934F.300k_Assembly_Contig_73_2 |
| 4 | 3 | 809aa | Wheat-Rye- |
| | | | 6R.300k_Assembly_Contig_48_2 |

| | Cluster | | |
|---|---|---|---|
| RFL 170 | 170 | Rf3 | |
| 0 | 0 | 219aa | Anapurna.300k_Assembly_Contig_174_3 |
| 1 | 1 | 560aa | Primepii.300k_Assembly_Contig_60_2 |
| 2 | 2 | 369aa | R197.300k_Assembly_Contig_94_2 |
| 3 | 3 | 560aa | R0934F.300k_Assembly_Contig_67_2 |
| 4 | 4 | 369aa | Wheat-Rye- |
| | | | 6R.300k_Assembly_Contig_113_2 |

[0355] Table 9B shows that:

[0356] In candidate group RFL 28, the sequences from Rf3 genotypes (Primepii and R0934F) are 857 amino acids long whereas sequences from all other germplasms (non-Rf3) are truncated (sizes ranging from 323-479 amino acids) and thus are most probably nonfunctional.

[0357] In candidate group RFL 29, the sequences from Rf3 accessions (Primepii and R0934F) are 828 amino acids long whereas sequences from all other (non-Rf3) germplasms are truncated and thus most probably nonfunctional.

[0358] In candidate group RFL 60, the sequences in non-Rf3 genotypes (R197 and R0932E) are either absent (R0932E) or deemed nonfunctional due to their amino acid length (287 amino acids). The sequences from Rf3 genotypes Primepii and R0934F based on their sequence length appear to be full length and functional. In addition, our mapping analysis positioned RFL60 cluster within the Rf3 interval.

[0359] In cluster RFL 170, the sequences from Rf3 genotypes (Primepii and R0934F) are significantly larger (560 amino acids) than sequences from non Rf3 genotypes that appear truncated (below 370 amino acids) and are considered as being nonfunctional. Our detailed sequence analysis has shown that RFL170 is actually a second ORF, in addition to RFL 288, encoded by the same contig. Both ORFs originate from the same RFL gene in which contiguity was disrupted by a frameshift.

### C. Rf7 and Rf-Rye Accessions:

[0360] The same rationale as for the analysis of Rf1 and Rf3 carrying accessions was applied to the accessions carrying the Rf7 restorer gene (R197 and T. timopheevii). The Rf7 gene was mapped on chromosome 7BL.

[0361] Table 10 shows that RFL 80, 128 and 191 are candidate Rf groups for the Rf protein encoded by the Rf7 gene as the proteins assigned to those clusters were found only in either R197 or T. timopheevii.

[0362] In regard to a restorer gene that originates from the introgression of rye chromosome 6R into wheat genome, clusters composed of single proteins originating from the Wheat-Rye-6R restorer line are considered as good candidates for a Rye-6R-specific restorer gene. Those criteria are true for the RFL 46, 87 and 208 orthologous groups listed in Table 6. Due to their high sequence divergence compared to Triticum sequences these genes are great candidates for restorer genes originating from rye.

TABLE 10
selection of RFL based on germplasm CMS information for Rf7

| | | | | | | | | Mapping |
|---|---|---|---|---|---|---|---|---|
| | | | | | | Restorer from Rye | Restorer | Positionned |
| CMS genotype | MAINTAINER | Rf3 | Rf1 + Rf7 | Rf1 | Rf3 | introgression | Triticum | in Rf7 mapping |
| RFLGene | ANAPURNA | PRIMEPII | R197 | R0932E | R0934F | Wheat-Rye-6R | timopheevii | interval |
| RFL49 | 0 | 0 | 2 | 0 | 0 | 0 | 2 | NO |
| RFL63 | 0 | 0 | 2 | 0 | 0 | 0 | 1 | NO |
| RFL80 | 0 | 0 | 1 | 0 | 0 | 0 | 0 | Not mapped |
| RFL85 | 0 | 0 | 2 | 0 | 0 | 0 | 1 | NO |
| RFL125 | 0 | 0 | 1 | 0 | 0 | 0 | 2 | NO |
| RFL128 | 0 | 0 | 1 | 0 | 0 | 0 | 0 | Not mapped |
| RFL174 | 0 | 0 | 1 | 0 | 0 | 0 | 2 | NO |
| RFL191 | 0 | 0 | 1 | 0 | 0 | 0 | 0 | Not mapped |

TABLE 11
selection of RFL based on germplasm CMS information for Rf-rye

| | | | | | | Restorer from Rye | Restorer |
|---|---|---|---|---|---|---|---|
| CMS genotype | MAINTAINER | Rf3 | Rf1 + Rf7 | Rf1 | Rf3 | introgression | Triticum |
| RFLGene | ANAPURNA | PRIMEPII | R197 | R0932E | R0934F | Wheat-Rye-6R | timopheevii |
| RFL46 | 0 | 0 | 0 | 0 | 0 | 1 | 0 |
| RFL87 | 0 | 0 | 0 | 0 | 0 | 1 | 0 |
| RFL208 | 0 | 0 | 0 | 0 | 0 | 1 | 0 |

### Example 5: Cloning of Candidate Genes for Fertility Restoration of T. timopheevii CMS

[0363] The nucleic acid sequence encoding any of the RFL proteins from a candidate Rf group could be used for cloning and transformation. However, in the present experiment for cloning and transformation purposes, a DNA sequence encoding the longest RFL protein which was characterized as having a start codon, mitochondrial targeting sequence and number of PPR motifs between 15 and 20 was preferentially used. If at least two longest RFL proteins happen to have the same length, the nucleic acid encoding such RFL protein, and presenting the longest 5′-UTR sequence will be preferentially chosen to perform the cloning and transformation steps.

[0364] Wheat-Rye-6R RFL46 sequence derived from Wheat-Rye-6R.300k_Assembly_Contig_35_1 was optimized to provide SEQ ID No 3115. This sequence was cloned via a Golden Gate reaction into the destination binary plasmid pBIOS10746, between the constitutive Zea mays ubiquitin promoter (proZmUbi depicted in SEQ ID No 3134) with the Zea mays ubiquitin intron (intZmUbi, depicted in SEQ ID No 3109, Christensen et al 1992) and a 3′ termination sequence of the gene encoding a sorghum heat shock protein (accession number: Sb03g006880); The termination sequence, named terSbHSP, is depicted in SEQ ID No 3110. The sequence of the recombinant construct is depicted in SEQ ID No3125.

[0365] Similarly as above, TaRFL104 sequence (derived from R0932E.300k_Assembly_Contig_82_1), TaRFL67 sequence (derived from Primepii.300k_Assembly_Contig_2_1), TaRFL79 sequence (derived from R197.300k_Assembly_Contig_120_1) and TaRFL89 sequence (derived from R0934F.300k_Assembly_Contig_99_1) were adapted for cloning purpose as depicted respectively in SEQ ID No3117 to 3120. These sequences were cloned via a Golden Gate reaction into the destination binary plasmid pBIOS10746. The sequences of the recombinant constructs are respectively depicted in SEQ ID No3131, 3128, 3129 and 3130.

[0366] TaRFL104 sequence (depicted in SEQ ID No3117) was cloned via restriction enzyme reaction, between the native Triticum aestivum promoter (proTaRFL104, SEQ ID No 3113) and the 3′ termination sequence of Triticum aestivum RFL104 encoding gene (terTaRFL104, depicted in SEQ ID No 3112), into the destination binary plasmid pBIOS10747. The sequence of the recombinant construct is depicted in SEQ ID No 3126.

[0367] TaRFL79 sequence (depicted in SEQ ID No3119) was cloned via restriction enzyme reaction, between the native Triticum aestivum promoter (proTaRFL79, SEQ ID No3123) and the 3′ termination sequence of T. aestivum RFL79 encoding gene (terTaRFL79, depicted in SEQ ID No 3124), into the destination binary plasmid pBIOS10747. The sequence of the recombinant construct is depicted in SEQ ID No 3122.

[0368] Wheat-Rye RFL46 sequence was also cloned via restriction enzyme reaction, between the native Triticum aestivum promoter (proTaRFL46, SEQ ID No 3114) and the 3′ termination sequence of Triticum aestivum RFL46 encoding gene (terTaRFL46, depicted in SEQ ID No 3111), into the destination binary plasmid pBIOS10747. For this construct, Wheat-Rye RFL46 sequence is derived from Wheat-Rye-6R.300k_Assembly_Contig_35_1 coding sequence and modified for cloning purpose without any optimization steps. The coding sequence is depicted in SEQ ID No3116. The sequence of the recombinant construct is depicted in SEQ ID No3127.

[0369] The binary destination vectors pBIOS10746 and pBIOS10747 are a derivative of the binary vector pMRT (WO2001018192A3).

[0370] All the binary plasmids described above were transformed into Agrobacterium EHA105.

### Example 6: Transformation & Fertility Restoration Phenotyping Assays

[0371] In order to screen for candidate genes involved in fertility restoration, the BGA_Fielder_CMS wheat cultivar harboring both cytoplasmic male sterility and strong transformability and regeneration potential was developed. BGA_Fielder_CMS wheat cultivars were transformed with Agrobacterium strains obtained in example 5 essentially as described by WO 2000/063398. Wheat transgenic events were generated for each construct described above.

[0372] For construct comprising RFL46, transformation was also performed with the cultivar Fielder.

[0373] All wheat transgenic plants generated in example 6 and control fertile plants were grown in a glasshouse under standard wheat growth conditions (16 h of light period at 20° C. and 8 h of dark period at 15° C. with constant 60% humidity) until control grains of the wild type Fielder cultivar reached maturity stage.

[0374] Fertility of the transgenic plants was evaluated by counting the number of seeds and empty glumes per spikes on each plant and comparing with the wild type Fielder and BGA_Fielder_CMS control plants. Plants are also evaluated by observing anther extrusion.

[0375] 16 transformed CMS-Fielder plants overexpressing the RFL79 sequence recited in SEQ ID No361 (as listed in table 7) under the ZmUbi promoter derived from 11 independent transformation events were analyzed.

[0376] All the plants present restoration of male fertility while 100% of untransformed CMS-Fielder plants grown in parallel are fully sterile with no anther extrusion and no seed produced, and 100% of WT-Fielder plants are fertile.

[0377] These results confirm that RFL79 can restore fertility of a CMS-T plant and that genetic transformation of CMS-Fielder is an efficient system to test the function of restorer-of-fertility genes.

### Example 7: Cloning of Rf Gene Promoter, Transformation and GUS Assays

[0378] The E. coli beta-glucuronidase (EcGUS) sequence was optimized (as depicted in SEQ ID No3121) and cloned via restriction enzyme reaction, between the native Triticum aestivum promoter (proTaRFL46, SEQ ID No 3114) and the 3′ termination sequence of T. aestivum gene encoding RFL46 (terTaRFL46, depicted in SEQ ID No 3111), into the destination binary plasmid pBIOS10743 forming pBIOS11468.

[0379] Fielder wheat cultivars were transformed with these Agrobacterium strains essentially as described by WO 2000/063398. Wheat transgenic events were generated for each construct described above.

[0380] After booting stage until anthesis, heads and floral organs were dissected and incubated in X-Gluc solution (Jefferson, 1987) at 37° C. for 16 hours, to assess GUS expression.

### Example 8: Identification of Full Length RFL PPR Genes Potentially Involved in Rf4 Fertility Restoration

[0381] A second capture was achieved using a set of different accessions compared to the capture performed in example 2. The following accessions were used:
[0382] Two Maintainer lines (Anapurna, Fielder)
[0383] The T. timopheevii accession as described in example 2
[0384] Four accessions identified as restorer lines of T. timopheevii-type CMS and characterized by the presence of the Rf4 restorer locus: L13, R113, 17F3R-0377 and GSTR435.
[0385] Rf1, Rf3 and Rf7 restorer accessions which are characterized by the absence of the Rf4 restorer locus: R197, R0934F.

[0386] GSTR435 is derived from an introgression of Aegilops speltoïdes into Triticum aestivum and is available at USDA (https://npgsweb.ars-grin.gov/gringlobal/search.aspx). The three other accessions, R113 (available via Australian Grains Genebank: 90819), L13 (available via Australian Grains Genebank: 90821) and 17F3R-0377 (derived from R113) are all derived from Triticum timopheevi introgressions into Triticum aestivum.

[0387] The bait design and hybridization with DNA fragments from the accessions were performed as in example 2. Then, a subset of 100K read pairs from each accession were mapped to the RFL groups identified in table 7 using Novoalign (version 3.04.06, http://www.novocraft.com/products/novoalign/) with settings allowing multiple hits with approximately 97% of identity (options: -r all -t 240). The average coverage per RFL was then calculated using Bedtools utilities (version 2.26.0, http://github.com/arq5x/bedtools2) coverageBed (option: -d) and groupBy (options: -o mean).

[0388] The relative coverage of all RFLs with the reads from each accession was assessed. A first ranking of the RFLs according to their coverage with reads from accessions derived from T. timopheevii was assessed. Only RFL groups showing no coverage (value from 0 to 10) with reads from “non-Rf” (maintainer) or non-Rf4 accessions but showing significant coverage (value >30) with reads from Rf4 accessions were considered. FIG. 3 shows the list of these RFL groups potentially corresponding to the Rf4 gene.

[0389] The coverage with accession GSTR435 was also assessed. FIG. 3 shows that only RFL120 shows significant coverage in accession GSTR435, although lower than for the other accessions. This could be explained by a greater phylogenetic distance between T. aestivum and Aegilops speltoïdes than between T. aestivum and T. timopheevii.

[0390] In order to investigate further the sequences related to the RFL120 group, the reads mapping to RFL120 for each Rf4 accession were then assembled in two steps. The first step consisted of merging overlapping read pairs with the utility bbmerge.sh from the BBMAP package (version 36.59 https://sourceforge.net/projects/bbmap/) and assembling them with the utility tadwrapper.sh from the same package (options: k=150, 180, 210, 240, 270, 300, 330, 360, 390, 420, 450 bisect=t). The contigs from the first step were deduplicated with the tool dedupe.sh also from the same package and given to another assembler, SPADES (version 3.10.1 http://bioinfspbau.ru/spades), as “trusted contigs” along with all read pairs from the same accession (options: --cov- cutoff 5 -careful) to generate the final assembly of the accession. Then for each accession the protein sequence RFL120 (SEQ ID No 477 as listed in table 7) best hit was searched using the tblastn utility from the BLAST+ package (version 2.2.30 https://blast.ncbi.nlm.nih.gov/Blast.cgi?PAGE_TYPE=BlastDocs&DOC_TYPE=Download) using default settings.

[0391] The following sequences were finally identified to be included in the RFL120 group:

[0392] RFL120-R113 which is depicted in SEQ ID No 3138 and is encoded by SEQ ID No 3142, RFL120-L13 which is depicted in SEQ ID No3137 and is encoded by SEQ ID No3141, RFL120-17F3R-0377 is depicted in SEQ ID No3135 and is encoded by SEQ ID No3139 and finally RFL120-GSTR 435 (called here RFL120-spelt) is depicted in SEQ ID No3136 and is encoded by SEQ ID No3140.

[0393] Alignment between the above amino acid or nucleotide sequences with the corresponding sequences from RFL120, called here “RFL120_timo”, and recited in SEQ ID No477 and SEQ ID No2031 (see table 7) shows that RFL120-17F3R-0377 is truncated. Regarding RFL120-R113 and RFL120-L13, the nucleotide sequences are both identical to RFL120-timo except that they are respectively 357 and 349 nucleotides longer on the 5′UTR region.

[0394] FIGS. 4a and 4b shows respectively the alignment between nucleotide and amino acid sequences of RFL120-spelt with RFL120-timo. This shows that RFL120-timo nucleotide sequence is 95% identical to the “RFL120_spelt” one which explains the low coverage previously observed with GSTR435 in FIG. 3.

[0395] In conclusion, the results confirm that the RFL120 group is the strongest candidate for Rf4.

### Example 9: Cloning, Transformation and Fertility Restoration Assays

[0396] Following the same methods as described in Examples 5 and 6, the nucleotide sequences of RFL120-timo, RFL120-spelt, RFL120-R113 and RFLK120-L13 are, when appropriate, optimized for ensuring proper expression in wheat and adapted for cloning purposes.

[0397] These sequences are cloned via a Golden Gate reaction into the destination binary plasmid pBIOS10746, between the constitutive Zea mays ubiquitin promoter (proZmUbi depicted in SEQ ID No 3134) with the Zea mays ubiquitin intron (intZmUbi, depicted in SEQ ID No 3109, Christensen et al 1992) and a 3′ termination sequence of the gene encoding a sorghum heat shock protein (accession number: Sb03g006880); The termination sequence, named terSbHSP, is depicted in SEQ ID No 3110.

[0398] Transformation and fertility assays are performed as in Example 6.

### Example 10: Evaluation of the CMS T. timopheevii Rf3 Restorer Lines Fertility

[0399] Eleven wheat elite lines classified as carrying Rf3 restorer gene known to be involved in restoration of the T-type cytoplasmic male sterility in Triticum timopheevii (T-CMS) were assessed for their capacity to restore the T-CMS cytoplasm and characterized for their fertility genotype. Hybrids resulting from crosses between a sterile CMS wheat line, used as a female parent, and a given wheat restorer line, used as a pollen donor, were studied regarding their ability to produce grain. The elite lines included both commercially available lines such as Altigo, Aristote, Cellule, Altamira, Rubisko, Primepii or Premio as well as Limagrain proprietary lines (Table 12). In addition, Chinese Springlines were included in the study (Table 12).

[0400] Fertility tests have been conducted indoors, either in growth chamber or in greenhouse, under controlled growth conditions enabling a normal expression of the fertility phenotype of the tested wheat plants. The plants were grown under 16 hours light period and temperature between 2° and 25° C. and 8 hours dark period at a temperature between 15° C. and 20° C., with humidity between 50 and 70%. The observed restoration of pollen fertility may be partial or complete.

[0401] The fertility score of F1 wheat plants carrying T-CMS cytoplasm may be calculated by dividing the total number of seeds threshed from a spike by the number of counted spikelets and may be compared with the fertility scores of a panel of control fertile plants which in this study consists of elite inbred lines bearing a normal wheat cytoplasm, grown in the same area and under the same agro-environmental conditions. It is preferred that such panel of lines comprises a set of at least 5 elite inbred lines. Besides, it is preferred that at least 10 spikes from different F1 individual plant will be assessed for a given experiment.

[0402] Fertility score i higher than zero (>0) indicates that the plant has acquired partial or full fertility restoration. For each fertility score, a statistical test is achieved to obtain a p-value. Examples of statistical tests are the Anova or mean comparison tests. A p-value below a 5% threshold will indicate that the two distributions are statistically different. Therefore, a significantly lower fertility score of the tested wheat plant as compared to the fertility score of the fertile control plant is indicative that the F1 plant has not acquired full restoration fertility (i.e. partial restoration). A significantly similar or higher fertility score is indicative that the F1 plant has acquired full restoration of fertility. The fertility scores indicated were calculated by dividing the total number of seeds threshed from a spike by the number of counted spikelets.

[0403] The t-tests were conducted by comparing the fertility scores of F1 plants carrying Rf3 restorer gene and the fertility scores of a panel of elite inbred lines grown under the same conditions (633 spikes from 37 winter and spring elite lines; μ=2.36, α=0.59).

[0404] The results presented in Table 12 show that there are two types of partial Rf3 restorer of fertility in the CMS hybrids. One that can be referred to as “Rf3” and which fertility scores are comprised between 1 and 1.8, and a second type referred to as “Rf3 weak” which fertility scores are less than 1. For example, the CMS-hybrids made with Primepii produced an average fertility score of 1.7 grains/spikelet over 10 individual F1 spikes (“Rf3” phenotype) while hybrids made with Altigo produced an average fertility score of 0.7 grains/spikelet over 47 individual F1 spikes (“Rf3 weak” phenotype) (Table 12). Different Chinese Spring lines were shown by genetic mapping and marker assisted selection to harbor an Rf3 restorer locus (data not shown). CMS-hybrids made with Chinese Spring lines were evaluated for fertility score. They show a mean estimated fertility score of 0.6 grains/spikelet and a “Rf3 weak” phenotype.

TABLE 12
Wheat elite lines used in the study and the fertility
scores of CMS-hybrids generated with their pollen.

| | | | Number of | | |
|---|---|---|---|---|---|
| | | | analysed | Fertility | |
| Elite variety | Genotype | Phenotype | spikes | score | STD |
| CHINESE | RFL29b | Rf3 weak | 20 | 0.6 | 0.7 |
| SPRING | | | | | |
| ALTIGO | RFL29b | Rf3 weak | 47 | 0.7 | 0.5 |
| ARISTOTE | RFL29b | Rf3 weak | 43 | 0.8 | 0.8 |
| CELLULE | RFL29a | Rf3 | 10 | 1.2 | 1.0 |
| ALTAMIRA | RFL29a | Rf3 | 20 | 1.5 | 1.1 |
| PREMIO | RFL29a | Rf3 | 12 | 1.2 | 1.0 |
| PRIMEPII | RFL29a | Rf3 | 10 | 1.7 | 0.8 |
| R0946E | RFL29a | Rf3 | 35 | 1.8 | 0.6 |
| RUBISKO | RFL29a | Rf3 | 7 | 1.2 | 0.6 |
| TJB155 | RFL29a | Rf3 | 27 | 1.7 | 0.7 |
| ATOMO | RFL29c | Maintainer | 22 | 0.0 | 0.0 |
| CONTROL | | | 633 | 2.4 | 0.6 |
| ELITES | | | | | |

*NA: Not available, STD: Standard Deviation

### Example 11: Comparison of Genotypes Between the Analyzed Rf3 Restorer Lines

[0405] The RFL gene capture was achieved with accessions listed in Table 12 as described in Example 2. For each RFL identified in Example 4B, the corresponding protein sequences from each accession were aligned for comparison.

[0406] The results show that for RFL29, RFL164 and RFL166, strong association between the phenotype and the genotype exist. For RFL29, three different alleles referred to as “a”, “b” and “c” were identified while two different alleles “a” and “b” are identified either for RFL164 or RFL166. All accessions with an “Rf3” phenotype carry RFL29a, RFL164a and RFL166a alleles while all the “Rf3 weak” accessions carry RFL29b, RFL166b and RFL164b alleles in their genotype

[0407] For RFL29, the maintainer line Atomo is characterized by the presence of two truncated ORFs, probably due to a frameshift mutation, RFL29c_1 and RFL29c_2, encoding proteins consisting of 258 and 535 amino acids, respectively. This genotype form is only present in maintainer lines (data not shown).

[0408] FIG. 5A shows the protein sequence alignment of RFL29a, RFL29b, RFL29c_1 and RFL29c 2. FIGS. 5B and 5C, respectively, show the protein sequence alignments of RFL164a and RFL164b (depicted in SEQ ID No 3144), and RFL166a and RFL166b (depicted in SEQ ID No3145).

### Example 12: Cloning, Transformation and Fertility Restoration Assays

[0409] Following the same methods as described in Examples 5 and 6, the nucleotide sequences of RFL29a (depicted in SEQ ID No 3146 or SEQ ID No1712 and encoding a sequence identical to SEQ ID No158), RFL29b (depicted in SEQ ID No 3149 and encoding a sequence identical to SEQ ID No3143), RFL164a (depicted in SEQ ID No 3147 or SEQ ID NO 2230 and encoding a sequence identical to SEQ ID No676), and RFL166a (depicted in SEQ ID No 3148 or SEQ ID NO:2238 and encoding a sequence identical to SEQ ID No684), were cloned via a Golden Gate reaction into destination binary plasmid pBIOS10746, between the constitutive Zea mays ubiquitin promoter (proZmUbi depicted in SEQ ID No 3134) with the Zea mays ubiquitin intron (intZmUbi, depicted in SEQ ID No 3109, Christensen et al 1992) and a 3′ termination sequence of the gene encoding a sorghum heat shock protein (accession number: Sb03g006880 terSbHSP depicted in SEQ ID No 3110). The sequences of each of the recombinant constructs are respectively depicted in SEQ ID No3150, SEQ ID No3151, 3152 and 3153.

[0410] Similarly, the RFL29a and RFL29b sequences were cloned downstream of their endogenous promoter pRFL29a (depicted in SEQ ID No 3154) and pRFL29b (depicted in SEQ ID No 3155) and the terminator sequence terSbHSP. The sequences of each of the recombinant construct are respectively depicted in SEQ ID No3156 and SEQ ID No 3157.

[0411] Finally, two other cassettes were made identically as described previously with the only exception that the corresponding endogenous terminator sequences terRFL29a (depicted in SEQ ID No3160) and terRFL29b (depicted in SEQ ID No3161) are used. The corresponding expression cassettes are respectively depicted in SEQ ID No3158 and SEQ ID No3159. Transformation and fertility assays are performed as in Example 6.

### Example 13: Comparison of the 5′UTR Sequence of the RFL29a and RFL29b Encoding Gene

[0412] In order to analyze whether the variation of the level of fertility could be explained by a variation in the gene expression level, the 5′UTR sequence of RFL29a gene was isolated from BACs generated from TJB155 line (Table 12) classified as “Rf3” and the 5′UTR sequence of RFL29b was identified from the Chinese Spring classified as “Rf3weak” line (IWGSC RefSeq v1.0 assembly).

[0413] The alignment of the 5′UTR regions identified in the RFL29a and RFL29b genes is shown in FIG. 6.

[0414] Sequence comparison shows that the 5′UTR sequence of the RFL29a gene comprises a deletion of the 163 bp-long region identified in the 5′UTR of RFL29b corresponding sequence (SEQ ID NO: 3174). Part of this region has been identified in the patent application WO2018015403 as being putatively involved in miRNA-mediated repression of the expression of the PPR gene identified downstream.

[0415] Sequence comparison between the different accessions listed in Table 12 shows that all “Rf3weak” accessions harbor the 163 bp and all the “Rf3” accessions harbor the 163 bp deletion.

[0416] Because of the 163 bp deletion in the 5′UTR sequence of RFL29a gene, it is expected that the 163 bp region impairs the expression of RFL29b gene such that the fertility level is weak in lines harboring the RFL29b allele compared to lines harboring the RFL29a allele.

### Example 14: Cloning, Transformation and Fertility Assays with a Deleted TaRFL29b Promoter

[0417] Following the same methods as described in Example 5, the nucleotide sequence of RFL29b was expressed under the modified promoter pRFL29bdel (depicted in SEQ ID No3162) which is bearing a deletion of the 163 bp region, from the nucleotide 1876 to nucleotide 2038 of the RFL29b promoter sequence depicted in SEQ ID No3155. The termination sequence, terSbHSP, depicted in SEQ ID No3110 is used. The recombinant construct is depicted in SEQ ID No3163.

[0418] Transformation of CMS*Fielder wheat line (which is either not “Rf3” or “Rf3 weak”) is performed as in Example 6 except that the following controls are added: all of the “Rf3” phenotype lines as listed in Table 12, all of the “Rf3 weak” lines as listed in Table 12 and finally the transformed lines with the cassette harboring the pTaRFL29b promoter upstream to RFL29b as described in example 12.

### Example 15: Modification of the Endogenous Promoter of RFL29b by CRISPR Technology to Revert “Rf3Weak” Lines to “Rf3” Lines

[0419] In order to increase the expression of RL29b, different deletions of the 163 bp are performed in the promoter of RFL29b using endonuclease for site-directed mutagenesis.

[0420] Table 13 provides the different endonucleases with the associated PAM motif and the corresponding target sequences.

[0421] FIG. 7 shows the position of the different target sequences around and within the 163 bp region identified for different endonucleases. The designed guide sequences that can be used in combination to perform a deletion in the 163 bp region are listed in Table 13.

TABLE 13

| Endonuc | | | |
|---|---|---|---|
| leases | Target_ID | Target name | guide sequence |
| LbCPF1 | 23 | LbCpf1-100- | TAATTTCTACTAAGTGTAGATCGAGCGGAGGG |
| | | Target-23 | AGTACTAGATAA(SEQ ID NO: 3175) |
| LbCPF1 | 42 | LbCpf1-100- | TAATTTCTACTAAGTGTAGATGGAACGGAGGG |
| | | Target-42 | AGTATTATCTAG(SEQ ID NO: 3176) |
| LbCPF1 | 67 | LbCpf1-100- | TAATTTCTACTAAGTGTAGATAGATAGCTAGAA |
| | | Target-67 | AGACAATTATT(SEQ ID NO: 3177) |
| LbCPF1 | 71 | LbCpf1-100- | TAATTTCTACTAAGTGTAGATTTTGAGATAGCT |
| | | Target-71 | AGAAAGACAAT(SEQ ID NO: 3178) |
| SpCAS9 | 14 | SpCas9-100- | TGACAAGTATTTCCGAGCGGGTTTTAGAGCTA |
| | | Target-14 | GAAATAGCAAGTTAAAATAAGGCTAGTCCGTTA |
| | | | TCAACTTGAAAAAGTGGCACCGAGTCGGTGCT |
| | | | TTT(SEQ ID NO: 3179) |
| SpCAS9 | 54 | SpCas9-100- | GACAATTATTTAGGAACGGAGTTTTAGAGCTAG |
| | | Target-54 | AAATAGCAAGTTAAAATAAGGCTAGTCCGTTAT |
| | | | CAACTTGAAAAAGTGGCACCGAGTCGGTGCTT |
| | | | TT(SEQ ID NO: 3180) |
| SpCAS9 | 55 | SpCas9-100- | AGACAATTATTTAGGAACGGGTTTTAGAGCTAG |
| | | Target-55 | AAATAGCAAGTTAAAATAAGGCTAGTCCGTTAT |
| | | | CAACTTGAAAAAGTGGCACCGAGTCGGTGCTT |
| | | | TT(SEQ ID NO: 3181) |
| SpCAS9 | 58 | SpCas9-100- | GAAAGACAATTATTTAGGAAGTTTTAGAGCTAG |
| | | Target-58 | AAATAGCAAGTTAAAATAAGGCTAGTCCGTTAT |
| | | | CAACTTGAAAAAGTGGCACCGAGTCGGTGCTT |
| | | | TT(SEQ ID NO: 3182) |
| SpCAS9 | 63 | SpCas9-100- | AGCTAGAAAGACAATTATTTGTTTTAGAGCTAG |
| | | Target-63 | AAATAGCAAGTTAAAATAAGGCTAGTCCGTTAT |
| | | | CAACTTGAAAAAGTGGCACCGAGTCGGTGCTT |
| | | | TT(SEQ ID NO: 3183) |
| SpCAS9 | 155 | SpCas9-100- | TTTCAACAAATGACTACATAGTTTTAGAGCTAG |
| | | Target-155 | AAATAGCAAGTTAAAATAAGGCTAGTCCGTTAT |
| | | | CAACTTGAAAAAGTGGCACCGAGTCGGTGCTT |
| | | | TT(SEQ ID NO: 3184) |
| SpCAS9 | 179 | SpCas9-100- | CTCTAGAGAGACAATTATTTGTTTTAGAGCTAG |
| | | Target-179 | AAATAGCAAGTTAAAATAAGGCTAGTCCGTTAT |
| | | | CAACTTGAAAAAGTGGCACCGAGTCGGTGCTT |
| | | | TT(SEQ ID NO: 3185) |
| SpCAS9 | 184 | SpCas9-100- | GAGAGACAATTATTTAGGAAGTTTTAGAGCTAG |
| | | Target-184 | AAATAGCAAGTTAAAATAAGGCTAGTCCGTTAT |
| | | | CAACTTGAAAAAGTGGCACCGAGTCGGTGCTT |
| | | | TT(SEQ ID NO: 3186) |

[0422] The nucleotide sequence encoding for LbCpf1 endonuclease is optimized (as depicted in SEQ ID No 3164) and cloned via a Golden Gate reaction into the destination binary plasmid pBIOS10746, between the constitutive Zea mays ubiquitin promoter (proZmUbi depicted in SEQ ID No 3134) with the Zea mays ubiquitin intron (intZmUbi, depicted in SEQ ID No 3109, Christensen et al 1992) and in the 3′ region, the mouse nuclear import NLS sequence (as depicted in SEQ ID No 3172) and the 3′ termination sequence terZmHSP depicted in SEQ ID No 3170.

[0423] The nucleotide sequence encoding for SpCas9 endonuclease is optimized (as depicted in SEQ ID No 3165) and cloned via a Golden Gate reaction into the destination binary plasmid pBIOS10746, downstream to the constitutive Zea mays ubiquitin promoter (proZmUbi depicted in SEQ ID No 3134) with the Zea mays ubiquitin intron (intZmUbi, depicted in SEQ ID No 3109, Christensen et al 1992) and the SV40NLS sequence (as depicted in SEQ ID No 3173) and upstream of the mouse nuclear import NLS sequence and the 3′ termination sequence terAtNos depicted in SEQ ID No 3171.

[0424] Each guide sequence is cloned between the pTaU6 promoter (depicted in SEQ ID No 3168) and the termination sequence TerRNApoIIII (depicted in SEQ ID No3169).

[0425] Each cassette expressing the endonuclease is cloned consecutively to the cassette expressing the corresponding guide sequence. A recombinant cassette expressing LbCpf1 and guide sequences directed to target −23 and target −71 is depicted in SEQ ID No3167. A recombinant cassette expressing SpCas9 and guide sequences directed to target -58 and target -54 is depicted in SEQ ID No3166.

[0426] Transformation is performed as in Example 6 except that all “Rf3 weak” lines as listed in Table 12 are transformed. Fertility assays to select lines with an “Rf3” phenotype are performed as in example 14.

### Example 16: Evaluation of the CMS T. timopheevii Restorer Lines Fertility

[0427] Some wheat elite lines possess an ability to partially restore the fertility of the cytoplasmic male sterility Triticum timopheevii (T-CMS). The hybrid formed between a sterile CMS wheat line taken as female and the wheat restorer line taken as male can produce grain. Commercial lines as Allezy, Altamira, Altigo, Aristote, Osado, Cellule or Premio and Limagrain proprietary lines have been tested for their capacity to restore T-CMS. All lines have also been characterized for their fertility genotype.

[0428] Fertility tests have been conducted indoor, either in growth chamber or in greenhouse, under controlled growth conditions enabling a normal expression of fertility of the tested wheat plants. The fertility scores indicated have been calculated by dividing the total number of seeds threshed from a spike by the number of counted spikelets. The t-tests conducted were done by comparing the fertility scores of F1s made with a restorer and the fertility scores of a panel of elite inbred lines grown under the same conditions (633 spikes from 37 winter and spring elite lines; μ=2.36, α=0.59).

[0429] The results in Table 14 show that these lines act as partial restorer of fertility in a CMS hybrid. For example, the hybrids made with Allezy produce an average fertility of 0.99 grains/spikelets over 33 individual F1 spikes. This native ability to partially restore the fertility of the CMS T. timopheevii was previously identified in wheat accessions as Primepii or Maris Hunstmann (Bahl and Maan, 1973), and it is confirmed by our own internal data (See Table 14). Beside this supposedly wheat intrisic source of restoration, the hybridizations between Triticum timopheevii and Triticum aestivum conducted by Wilson (Wilson and Ross 1962) contributed to the introduction into wheat of further restorer genes which chromosome arm localization was identified through monosomic analysis (Bahl and Maan, 1973; Maan and al, 1984).

[0430] Following these initial works many breeding programs implemented worldwide aimed at creating restorer lines for the T-CMS such as TJB155 (BBSRC Small Grain Cereals Collection: 2072 to 2075), which ability to restore is also confirmed by our own internal data (Table 14).

[0431] L13 (available via Australian Grains Genebank: 90821), is a wheat restorer line selected from R113 (available via Australian Grains Genebank: 90819) which carries the restorer allele Rf4. It produces a low level of fertility restoration when crossed with CMS lines (0.85 seeds/spikelet on average). When compared with the fertility scores of a panel of elite lines grown under the same conditions it appears that none of the tested putative restorer make possible a full restoration of fertility of the hybrid (p-values <0.05. table 14).

[0432] Table 14 also shows that restorer lines bearing two different Rf loci, are not able to fully restore the sterility induced by T-CMS. Therefore, all restorer lines tested, with single or two Rf loci are only partial T-CMS restorer lines.

TABLE 14
mean fertility scores and standard deviation from the indicated
number of spikes. The first column indicates the name
of the male line taken as pollinator for the F1 cross.
All the data (except for Elite inbred lines) presented
are from the created F1 crosses between the listed lines
and a CMS tester. “Elite inbred lines” data refers
to a panel consisting of 37 winter and spring elite lines.
The t-test was implemented comparing the mean of fertility
for each of the F1 crosses with the mean of the fertility scores of
a panel of 633 spikes of elite inbred lines bearing fertile cytoplasm.

| | | | FER- | STD | P- |
|---|---|---|---|---|---|
| | Haplotypes | SPIKES | TILITY | DEV | VALUE |
| ALLEZY | Rf3 | 33 | 0.99 | 0.89 | 3.00E−33 |
| ALTAMIRA | Rf3 | 20 | 1.48 | 1.1 | 4.00E−10 |
| ALTIGO | Rf3 | 47 | 0.71 | 0.55 | 1.00E−63 |
| ARISTOTE | Rf3 | 37 | 1 | 0.73 | 3.00E−37 |
| CELLULE | Rf3 | 10 | 1.25 | 0.99 | 5.00E−09 |
| MARISHUNSTMANN | Rf3 | 16 | 1.26 | 0.88 | 7.00E−13 |
| OSADO | Rf3 | 9 | 1.52 | 0.68 | 2.00E−05 |
| PREMIO | Rf3 | 12 | 1.21 | 1.03 | 8.00E−11 |
| PRIMEPII | Rf3 | 51 | 1.55 | 0.75 | 2.00E−19 |
| TJB155 | Rf3 | 27 | 1.7 | 0.66 | 2.00E−08 |
| R204 | Rf1 + Rf7 | 59 | 2.09 | 0.51 | 6.00E−04 |
| L13 | Rf4 | 12 | 0.85 | 0.38 | 4.00E−18 |
| R0929D | Rf3 + Rf7 | 18 | 1.83 | 0.62 | 1.63E−04 |
| R0936T | Rf1 + Rf3 | 4 | 1.76 | 0.11 | 4.06E−02 |
| ELITE inbred lines | | 633 | 2.36 | 0.59 | |

### Example 17: Fine Mapping of the Genomic Region Containing Rf1, Rf3 and Genetic Mapping of Rf4 and Rf7 Genetic Determinants

### A. Fine-Mapping of the Genomic Region Containing Rf1 Genetic Determinants

[0433] Three F2 mapping populations segregating for Rf1 (R197×Kalahari, R204×Alixan and R0932E×Altigo) encompassing 210, 218 and 212 individuals respectively were phenotyped as described in example 1 and genotyped with 18100 SNP markers using Limagrain's internal genotyping platform. Fertility of R204 and R197 lines is genetically associated to Rf1 and Rf7 locus. Fertility in R0932E line is associated to Rf1 locus.

[0434] Rf1 was first mapped on the short arm of the chromosome 1A between 4 cM and 10.9 cM on Limagrain's internal consensus map and physically delimited by SNP markers cfn1087371 and cfn0530841. These two SNP markers delimit the largest possible interval defined by the three mapping populations (see FIG. 8).

[0435] Following, joint analysis of the three mapping populations and phenotyping of the individual F2 recombinant plants on derived F3 families validated the QTL position and delimited Rf1 interval between 7 cM and 8.9 cM on Limagrain's internal consensus map and physically delimited by SNP markers cfn1082074 and cfn0523990. We used the genomic resources of the IWGSC Whole genome assembly, ‘IWGSC WGA’ (available from June 2016 from the URGI IWGSC repository) to anchor the locus to the wheat genome reference physical map. The left border (cfn1082074) was anchored on the IWGSCWGAV02_1AS_scaffold44309 scaffold and the right border (cfn0523990) was anchored on the IWGSCWGAV02_1AS_scaffold47238 scaffold.

[0436] Next, we decided to enlarge the population sizes to fine-map the locus and screened 2976 and 3072 F3 lines from R197×Kalahari and R204×Alixan derived from F2 plants heterozygote at the locus respectively. Phenotyping and analysis of recombinant plant progenies within the interval redefined a smaller mapping interval between 7.5 and 8.8 cM delimited by cfn0522096 and cfn0527067 SNP markers on the IWGSCWGAV02_1AS_scaffold44309 scaffold and the IWGSCWGAV02_1AS_scaffold47238 scaffold respectively.

### B. Fine-Mapping of the Genomic Region Containing Rf3 Genetic Determinants

[0437] Three F2 mapping populations (TJB155×Anapurna, 2852×Altamira, and AH46×R0946E) encompassing 217, 135, and 246 individuals respectively and a doubled-haploid (DH) population (H46×R934F) consisting of 140 individual plants segregating for Rf3 were phenotyped as described in example 1 and genotyped with 18100 SNP markers using Limagrain's internal genotyping platform. Sources of Rf3 locus are TJB155, Altamira and R0946E.

[0438] Rf3 was first mapped on the short arm of the chromosome 1B between 18.9 cM and 24.2 cM on Limagrain's internal consensus map and physically delimited by SNP markers cfn0554333 and cfn0560679. These two SNP markers delimit the largest possible interval defined by the four mapping populations (see FIG. 9).

[0439] Following, joint analysis of the four mapping populations and validation of the phenotype of the individual F2/DH recombinant plants on derived F3 families validated the QTL, genetically delimited the locus between 22.2 cM and 22.7 cM on Limagrain's internal consensus map and physically delimited the Rf3 interval between SNP markers cfn0436720 and cfn0238384. We used the genomic resources of the IWGSC Whole genome assembly, ‘IWGSC WGA’ (available from June 2016 from the URGI IWGSC repository) to anchor the locus to the physical map. The left border (cfn0436720) was anchored on the IWGSCWGAV02_1BS_scaffold35219 scaffold and the right border (cfn0238384) was anchored on the IWGSCWGAV02_1BS_scaffold5117 scaffold.

[0440] Next, we decided to enlarge the population sizes to fine-map the locus and screened 2496 and 672 plants from TJB155×Anapurna and AH46×R0946E derived F2 plants heterozygote at the locus. Analysis of recombinant F3 plant progenies within the interval redefined a smaller mapping interval between 22.5 and 22.7 cM delimited by cfn1249269 and BS00090770 SNP markers on the IWGSCWGAV02_1BS_scaffold35219 scaffold and the IWGSCWGAV02_1BS_scaffold5117 scaffold respectively.

### C. Mapping of the Genomic Region Containing Rf7 Genetic Determinants

[0441] We crossed R197 (harboring Rf1 and Rf7 locus) and Primepii (harboring Rf3 locus) and then derived a population of 176 plants from individuals that were rf1 and rf3, which means not carrying the restorer alleles at the loci Rf1 and Rf3. The plants were genotyped with 18100 SNP markers using Limagrain's internal genotyping platform and phenotyped as described in example 1. We mapped the Rf7 locus on chromosome 7BL. Moreover, internal genotyping data showing a strong genetic divergence suggests the presence of an exotic chromosomal fragment which is stably transmitted through generation. We identified a large QTL ranging from 45 cM to 88 cM on chromosome 7B on Limagrain's internal consensus map with a peak on 46.7 cM (cfn0919993 with LOD score of 3.37E-40). First expertise of the recombinant plants suggests the Rf7 gene could be located between cfn3407185 and W90K_RAC875_c33564_120 markers delimiting a mapping interval of 0.3 cM between 46.7 cM and 47 cM on Limagrain's internal consensus map.

### D. Mapping of the Genomic Region Containing Rf4 Genetic Determinant

[0442] A mapping population from the cross between AH46 and L13 (harboring Rf4 locus) consisting of 124 individual plants segregating for Rf4 was genotyped with 18100 SNP markers using Limagrain's internal genotyping platform and phenotyped as described in example 1. A QTL that we named Rf4 was identified on chromosome 6B between 0 cM to 65 cM on Limagrain's internal consensus map with a peak on 43.3 cM (cfn0393953 with LOD score of 1.08E-13). Moreover, internal genotyping data showing a strong genetic divergence suggests the presence of an exotic chromosomal fragment which is stably transmitted through generation. It is expected that the rate of recombination be very low within this chromosomal region and, consequently, any marker in linkage with cfn0393953 is considered to be associated with Rf4 locus.

### Example 18: Identification of SNP Associated with the Rf Genes and its Use in MAS

[0443] We constructed a BAC library with a DH line comprising Rf1, Rf3 and Rf7 alleles. This library was used for the identification of BAC clones within the Rf1 and Rf3 QTL intervals. More specifically, we identified and sequenced and genetically validated 3 BAC clones within the Rf1 region and 3 BAC clones within the Rf3 region. The BAC sequences were compared to Chinese Spring reference genome for SNP discovery. We then saturated Rf1 and Rf3 mapping intervals by mining available SNPs from public genomic resources and the newly discovered SNPs from sequenced BAC clones.

[0444] Screening for polymorphic and informative SNP markers on a diversity panel consisting of 83 wheat elite plants and known restorers for Rf1, Rf3, Rf4 and Rf7 identified a set of tightly linked markers localized within or in the immediate flanking regions of the Rf1, Rf3, Rf4 and Rf7 mapping intervals. These SNP markers can be used alone and/or in haplotype to select for Rf or rf plants in MAS breeding schemes (FIG. 10A and FIG. 11A). Allele information, marker sequences and primer information are provided in Table 15. Following, smaller sets of 2-3 markers of high quality were chosen to follow the traits in MAS breeding schemes.

[0445] As an example, the identification of the presence of the Rf1 locus in the genome of a plant is achieved by using either the marker 276113_96B22_97797 or 104A4_105588 (FIGS. 10A and B).

[0446] Similarly, the identification of the presence of the Rf3 locus in the genome of a plant is achieved by using either the marker 136H5_3M5_7601 or 136H5_3M5_89176 (FIGS. 11A, 11B, 11C, 11D and Table 15). However, any marker listed on the FIG. 11A can be used to distinguish the maintainer lines from the restorer lines if they are polymorphic in the germplasm. As an example, in the Table 16, the presence vs absence of the Rf3 locus is achieved by using either the marker cfn1246088 or IWB72107

[0447] The identification of the presence of the Rf7 locus in the genome of a plant is achieved by using the markers cfn0917304, cfn0919993 and cfn0920459 (Table 17). In this case the 3 markers might be used in haplotype to distinguish restorer plants from maintainer plants. Thus the haplotype TGC would identify the restorer plants.

[0448] Finally, the identification of the presence of the Rf4 locus in the genome of a plant is achieved by using the markers cfn0393953 and cfn0856945 (Table 18).

TABLE 15
Haplotypes of a series of restorer lines and maintainer lines at
the locus Rf3 for 2 SNP markers. Those 2 SNP
markers makes possible to fully distinguish the maintainer
lines from the restorer lines (including the elite lines Altamira,
Cellule, Premio and the accessions TJB155 and Primepi).

| | R: restorer/ | | 136H5_ | 136H5_ |
|---|---|---|---|---|
| | M: | | 3M5_ | 3M5_ |
| CODE | maintainer | Rf alleles | 7601 | 89176 |
| LGWR16- | R | homozygous Rf3 | T | A |
| 0016 | | | | |
| LGWR16- | R | homozygous Rf3 | T | A |
| 0026 | | | | |
| ALTAMIRA | R | homozygous Rf3 | T | A |
| CELLULE | R | homozygous Rf3 | T | A |
| TJB155 | R | homozygous Rf3 | T | A |
| ALLEZY | R | homozygous Rf3 | T | A |
| PREMIO | R | homozygous Rf3 | T | A |
| PRIMEPI | R | homozygous Rf3 | T | A |
| AIGLE | M | homozygous rf3 | C | G |
| AIRBUS | M | homozygous rf3 | C | G |
| ALHAMBRA | M | homozygous rf3 | C | G |
| ALIXAN | M | homozygous rf3 | C | G |
| AMADEUS | M | homozygous rf3 | C | G |
| ANAPURNA | M | homozygous rf3 | C | G |
| APACHE | M | homozygous rf3 | C | G |
| ARKEOS | M | homozygous rf3 | C | G |
| ARLEQUIN | M | homozygous rf3 | C | G |
| ARTDECO | M | homozygous rf3 | C | G |
| ARTURNICK | M | homozygous rf3 | C | G |
| ATOMO | M | homozygous rf3 | C | G |
| AVENUE | M | homozygous rf3 | C | G |
| CEZANNE | M | homozygous rf3 | C | G |
| CROISADE | M | homozygous rf3 | C | G |
| FRUCTIDOR | M | homozygous rf3 | C | G |
| GAZUL | M | homozygous rf3 | C | G |
| HERMANN | M | homozygous rf3 | C | G |
| HORATIO | M | homozygous rf3 | C | G |
| KALAHARI | M | homozygous rf3 | C | G |

TABLE 16
Haplotypes of a series of restorer lines and maintainer lines at the
locus Rf3 for 2 SNP markers. Those 2 SNP markers makes possible to
fully distinguish the maintainer lines from the restorer lines.

| | R: restorer/ | | | |
|---|---|---|---|---|
| | M: main- | | | |
| CODE | tainer | Rf alleles | cfn1246088 | IWB72107 |
| ALTIGO | R | homozygous Rf3 | A | A |
| ARISTOTE | R | homozygous Rf3 | A | A |
| OSADO | R | homozygous Rf3 | A | A |
| AIGLE | M | homozygous rf3 | C | G |
| AIRBUS | M | homozygous rf3 | C | G |
| ALHAMBRA | M | homozygous rf3 | C | G |
| ALIXAN | M | homozygous rf3 | C | G |
| AMADEUS | M | homozygous rf3 | C | G |
| ANAPURNA | M | homozygous rf3 | C | G |
| APACHE | M | homozygous rf3 | C | G |
| ARKEOS | M | homozygous rf3 | C | G |
| ARLEQUIN | M | homozygous rf3 | C | G |
| ARTDECO | M | homozygous rf3 | C | G |
| ARTURNICK | M | homozygous rf3 | C | G |
| ATOMO | M | homozygous rf3 | C | G |
| AVENUE | M | homozygous rf3 | C | G |
| CEZANNE | M | homozygous rf3 | C | G |
| CROISADE | M | homozygous rf3 | C | G |
| FRUCTIDOR | M | homozygous rf3 | C | G |
| GAZUL | M | homozygous rf3 | C | G |
| HERMANN | M | homozygous rf3 | C | G |
| HORATIO | M | homozygous rf3 | C | G |
| KALAHARI | M | homozygous rf3 | C | G |

TABLE 17
Haplotypes at the Rf7 locus for the restorer lines LGWR16-0016 and LGWR16-
0026 and for a series of maintainer lines.

| | R: restorer/ | | | | |
|---|---|---|---|---|---|
| CODE | M: maintainer | Rf alleles | cfn0917304 | cfn0919993 | cfn0920459 |
| LGWR16-0016 | R | homozygous Rf1, Rf3, Rf7 | T | G | C |
| LGWR16-0026 | R | homozygous Rf1, Rf3, Rf7 | T | G | C |
| AIGLE | M | homozygous rf1, rf3, rf7 | G | — | G |
| AIRBUS | M | homozygous rf1, rf3, rf7 | T | G | G |
| ALHAMBRA | M | homozygous rf1, rf3, rf7 | G | T | G |
| ALIXAN | M | homozygous rf1, rf3, rf7 | T | T | C |
| AMADEUS | M | homozygous rf1, rf3, rf7 | G | G | C |
| ANAPURNA | M | homozygous rf1, rf3, rf7 | G | T | G |
| APACHE | M | homozygous rf1, rf3, rf7 | G | T | C |
| ARKEOS | M | homozygous rf1, rf3, rf7 | G | T | G |
| ARLEQUIN | M | homozygous rf1, rf3, rf7 | G | G | C |
| ARTDECO | M | homozygous rf1, rf3, rf7 | G | — | G |
| ARTURNICK | M | homozygous rf1, rf3, rf7 | T | T | G |
| ATOMO | M | homozygous rf1, rf3, rf7 | T | T | G |
| AVENUE | M | homozygous rf1, rf3, rf7 | T | T | C |
| CEZANNE | M | homozygous rf1, rf3, rf7 | G | T | G |
| CROISADE | M | homozygous rf1, rf3, rf7 | G | T | C |
| FRUCTIDOR | M | homozygous rf1, rf3, rf7 | G | T | G |
| GAZUL | M | homozygous rf1, rf3, rf7 | — | G | C |
| HERMANN | M | homozygous rf1, rf3, rf7 | T | G | G |
| HORATIO | M | homozygous rf1, rf3, rf7 | G | — | G |
| KALAHARI | M | homozygous rf1, rf3, rf7 | G | — | G |

“—” scores correspond to dominant markers with no amplification in several maintainer lines.

TABLE 18
Haplotypes at the Rf4 locus for the restorer
lines L13 and R113 and maintainer lines.

| | R: restorer/ | | | |
|---|---|---|---|---|
| | M: main- | | | |
| CODE | tainer | Rf alleles | cfn0393953 | cfn0856945 |
| LGWR16- | M | homozygous rf4 | T | T |
| 0016 | | | | |
| LGWR16- | M | homozygous rf4 | T | T |
| 0026 | | | | |
| AIGLE | M | homozygous rf4 | T | T |
| AIRBUS | M | homozygous rf4 | T | T |
| ALHAMBRA | M | homozygous rf4 | T | T |
| ALIXAN | M | homozygous rf4 | T | T |
| AMADEUS | M | homozygous rf4 | T | T |
| ANAPURNA | M | homozygous rf4 | T | T |
| APACHE | M | homozygous rf4 | T | T |
| ARKEOS | M | homozygous rf4 | T | T |
| ARLEQUIN | M | homozygous rf4 | T | T |
| ARTDECO | M | homozygous rf4 | T | T |
| ARTURNICK | M | homozygous rf4 | T | T |
| ATOMO | M | homozygous rf4 | C | T |
| AVENUE | M | homozygous rf4 | T | T |
| Cezanne | M | homozygous rf4 | T | T |
| CROISADE | M | homozygous rf4 | T | T |
| FRUCTIDOR | M | homozygous rf4 | T | T |
| GAZUL | M | homozygous rf4 | — | T |
| HERMANN | M | homozygous rf4 | T | T |
| HORATIO | M | homozygous rf4 | C | T |
| KALAHARI | M | homozygous rf4 | T | T |
| L13 | R | homozygous Rf4 | C | G |
| R113 | R | homozygous Rf4 | C | G |

### SEQUENCES OF SNP MARKERS

TABLE 19
Marker sequences and SNP position in sequence.

| Marker ID | AlleleX | AlleleY | Sequence | SEQ ID NO: |
|---|---|---|---|---|
| cfn0523072 | C | T | CAAAGGCTTGACAATGATAATGCCCCCGAATC | 3187 |
| | | | TTG[C/T]GATAGACCTCATGCGCTAGAGTTGTT | |
| | | | TTCCTCAAT | |
| cfn0523109 | A | C | GACAAAGTTGAGGTGAACAAAACAGGCCTAC | 3188 |
| | | | AATC[A/C]GCTAACTTACGTATATCCACATTAG | |
| | | | CACACACCAC | |
| 276I13_96B22_97797 | C | T | AAATTCGACAAGTACTATGGCTATGTCTCTGA | 3189 |
| | | | ATG[C/T]TTGTTTGGTTTTATTTGTCTATATTGT | |
| | | | CGTTGTAT | |
| cfn0522096 | C | G | ATGCAAAGTAGTACTCGTAGAGAGTTAACACA | 3190 |
| | | | GAC[C/G]AGTGATTTATTGGGTGGTATTCTACT | |
| | | | TGATATTTG | |
| cfn0527763 | T | C | ATAAAGAAAAGTAGAGGAAGCTTATGAATAA | 3191 |
| | | | AATGGAAAAGGAATTCAAAATTGCCGATAAA | |
| | | | TATAAAACTCATAACAAATCTAGCCACGCAAA | |
| | | | TGCCCG[T/C]GCCGCTCTGCTCGTTTGTACATG | |
| | | | TCTCGGTGGACAAGGAAGAACCCAACAATTGC | |
| | | | ACAGGTCAATCTTATCCAGCAAAACAAGGAA | |
| | | | GCAAACCAAACAGG | |
| 104A4_105172 | TG | CA | ATGTTGCCTCTCGCTAGCCGCTGTCGMACCCA | 3192 |
| | | | ATGAATAATGTT[TG/CA]TGGGTTCTGGCTCCG | |
| | | | AGAGGATGGCCGGCTYCCC | |
| 104A4_105588 | A | C | GTTCCTTGTGACATGTACTCATA[A/C]ACAAGA | 3193 |
| | | | GCCATATACTCCCCATCCTTGCA | |
| cfn0373248 | T | A | GACATAATGTGTAATAACAGCCCATAATGCAA | 3194 |
| | | | TAAATATCAATATAAAAGCATGATGCAAAATG | |
| | | | GACGTATCATTGCCACGRAAAAAATCTCACAA | |
| | | | GATG[T/A]GACCATTTGATCCTCRTAATTGTTG | |
| | | | TTCTAGACCCACTCCTAAGTMTAACATTCTTT | |
| | | | ATGTCTATYCTTCAAATCCCGAAGAGTAATGA | |
| | | | AAACTATCGAA | |
| cfn1097828 | T | C | CCATGAGTACCCGCTACTATCGATCTCCCTCCT | 3195 |
| | | | CCCTGTAGGAGGCCTACGAACGATGCCCTCAG | |
| | | | GTCCTGCTTCCTCTCGGTAGCGATGGATCCAC | |
| | | | CTG[T/C]GGTTGCTCTCTCAGGAACCAGTGTTG | |
| | | | GCGGCGGCTCATCCGGGGCGCTGGATCTTGGT | |
| | | | GATGTGCTGGAACAACTCAACTTGGAAGACGA | |
| | | | AGAATTTGAT | |
| cfn0527067 | A | G | GACAATATGATTCACCCTAGATCCTTCACCTT | 3196 |
| | | | ACA[A/G]TTCGAAAAAAATAAAAGAACAAAAG | |
| | | | TAATTTGACA | |
| cfn0528390 | A | G | ACGAAGATGAGGAAGGTCTTCATGTTGGGTTT | 3197 |
| | | | ATG[A/G]TTACTAATACTTGCTTGGAATAGATG | |
| | | | TTTTTGATC | |
| BWS0267 | A | G | GTTACCCCAATATGCTCCCTCCTTGCACATTTT | 3198 |
| | | | CTTCAGCTGCATAAAAAMCAGAATACC[A/G]C | |
| | | | ATCAGTTGCCTGAACCTTAACGCAGGTGCAGA | |
| | | | AATAAGGCGACATAATTTYCACTAATC | |
| cfn0527718 | C | T | AGGAAAATAAATTGTTCACAACATGGACATGA | 3199 |
| | | | GAA[C/T]GGGGCAACCAAAAAGGGAAGAACAT | |
| | | | TGGAGGAAAC | |
| cfn0524469 | G | T | TTTGTACTGCACGTAGTAAGTATTGATTTTTCT | 3200 |
| | | | GT[G/T]TGCTCTCTGTGGACTTAGATTTGAAAA | |
| | | | TTGGCCTT | |
| cfn0524921 | A | G | ATGCACATTGTTTCCATGTTAAGCTTATATTGT | 3201 |
| | | | GC[A/G]TAACTCAAAAGATTGAAATGGAATTA | |
| | | | CCAAAGGGC | |
| cfn1122326 | C | T | ACTGACTGTTGGAATCTGATTAAGACGCTGGA | 3202 |
| | | | GAA[C/T]CCGAGCCAAGATATGTCACGACTAG | |
| | | | GCCATCTGGA | |
| cfn1252000 | A | G | AATCAGATCCTGTTAATGCTGTAGCCATTCTTG | 3203 |
| | | | CA[A/G]GCGACACCTTGTCCCAGTCGTCTTATG | |
| | | | GGCACTTA | |
| IWB14060 | A | G | GGCAGAGCCGGTCGACGGAGAGGAGCGCCAT | 3204 |
| | | | TCGACGCGTCTTCCGCAAT[A/G]TGTTTGCCTG | |
| | | | CTTCGGCCGCGGCCATTCGGCGAGCTCCCACG | |
| | | | CTTCGTCC | |
| cfn1249269 | A | G | CGTTTAAAAGAACACAAATGTGGCCCTAGTGA | 3205 |
| | | | TCA[A/G]GTACACATATTTGTCACCTCTTTGAA | |
| | | | TCTTACTTA | |
| 219K1_166464 | C | T | CGGGCTGATGAGGCTCTCGACGTGCTGCTTCA | 3206 |
| | | | CAGGATGCCTGAGCTGGGCTGCAC[C/T]CCCA | |
| | | | ACGTGGTGGCATATACCACGGTCATCCACGGC | |
| | | | TTCTTTAAGGAAGGC | |
| 219K1_158251 | G | A | GCGCTATCCGGCGTCGTGTTCCCTCTTGGGGG | 3207 |
| | | | AATCGTCCTGGAGATGGATCCGGTCA[G/A]AG | |
| | | | GGGCCCGTGATTTGTGAGGATGTGTGTGTTGT | |
| | | | TTCCCGAAAGGCG | |
| 219K1_111446 | A | C | CTTTGACCTTAAATTCTTGTACTAATTTAGCAG | 3208 |
| | | | AATCGTTCTTCGAGAAGCACTC[A/C]AAAAAT | |
| | | | GGTTTGTCTTGGGTCTGTATCATATTTTCTCTG | |
| | | | AACAAACAGGCGTGA | |
| 219K1_110042 | T | C | GACTTAGCCTCACACGGAATCGAGTCAACCAA | 3209 |
| | | | TTCC[T/C]GTCGGTTTTGAGTGGCTCCCTTGAA | |
| | | | GATGCAATCGTTTTCAGCATGGTCAGATTAAT | |
| | | | CAGCGAGCGTGC | |
| 219K1_110005 | C | T | CATGTAGTGGCTGGCGTCTAAGCGCCTTTTCTT | 3210 |
| | | | CTTCCAGCATCTA[C/T]GACTTAGCCTCACACG | |
| | | | GAATCGAGTCAACCAATTCCTGTCGGTTTTGA | |
| | | | GTGGCTCCCTTGAAGATG | |
| 219K1_107461 | A | C | GTCGTATATATTGTTTGTATTAAAAAGTTGTGT | 3211 |
| | | | GTTTTG[A/C]GTCATAATTTTTAAAATATTATT | |
| | | | ATGTCATTTTCAAATTCGCATCAAC | |
| 219K1_99688 | T | C | AATCTTCTTGACTTCATCCATCCGCCTTGTTGC | 3212 |
| | | | CCTGCGCAAAATCAAACT[T/C]CCCCGTCCTTA | |
| | | | TCATCAAGTCAGGTCCCGCCCTGGGCAGAGAG | |
| | | | AG | |
| 219K1_37 | C | T | CGGCAGATATCACAAAGGGCTATCCTGGTGAA | 3213 |
| | | | CAA[C/T]AAGATGGGTCAGAATTTGATAATGA | |
| | | | AGCCTCAAGCCC | |
| cfn1270524 | A | T | AATAGATGCACGCATCGGCGACCATTTTTTAG | 3214 |
| | | | TACTTTTTGCCTTTTTTGAAAATTTTGTCATTA | |
| | | | AAAGACAAATGCCTAGTCTATACCTGATAAAC | |
| | | | TAA[A/T]ATCATACATAGAGAAAATGGTCATTT | |
| | | | GGTTGAGTTTCGGTACATGCTGAGATGGTTGC | |
| | | | ACTTCGGTGCATCTGCTTTGCTTCCATCACATC | |
| | | | ATAATGTCT | |
| 136H5_3M5_7601 | T | C | GCTGCTTGTAGCGTCCCCCATGGCACCTG[T/C] | 3215 |
| | | | GAAGAGGTTTTCGGCCACAGAGAAGGGGAAG | |
| | | | GCTC | |
| cfn1288811 | T | G | AAAATTACTTTTCACGCGCTTCGTTGGTCTGAC | 3216 |
| | | | AGTGCGAGCATAATTTTACTTTTTCTCAGTTTT | |
| | | | ACTTAATTTGGTTAACCAAATCCTTTTTGATTT | |
| | | | T[T/G]AACTAGAAAACCGAATGTCAAACATTG | |
| | | | TGCAAATTTGGAAACTGAAACTGAAACCAAA | |
| | | | AACCTAAAAAAATGATTAGTTTGTTTTTTTGTT | |
| | | | CTTGTTTCG | |
| 136H5_3M5_89176 | A | G | gtatttCTTAGGATTTTCTCACCGGCATCTCC[A/G] | 3217 |
| | | | TTTTTTGAGCAAGAGTATTTAAGGATGGTAGG | |
| | | | C | |
| 136H5_3M5_89263 | C | T | AACAAAGATGCTAGTAAGAACATGAACCTAG | 3218 |
| | | | TTGCTCATTTTTAACAACAATTGCCCACCAACC | |
| | | | TGACATGCTCTTCCCATGTTCTTTTTTTGCTCA | |
| | | | AAA[C/T]AGAGATGCTAGTCCAAATATTTTTCT | |
| | | | AGTTGCTTACATTTTAAACAACAATTGCCTAC | |
| | | | CATCCTTAAATACTCTTGCTCAAAAAACGGAG | |
| | | | ATGCCGGTGA | |
| 136H5_3M5_138211 | T | A | AATACAGACTGGGTGCAAAGCCAAGATGAT[T/A] | 3219 |
| | | | GTAAAATTGATTGATGGCCGTTGGGAGGT | |
| cfn0556874 | C | T | TGTAAAGAAGCTTAACCAGGAAAGCTATCAG | 3220 |
| | | | GGCCATAGGGAATGGCTGGTTAGTGACAATTT | |
| | | | TGCCTGCTGGAAATGGGATTTCTTGTTTATTTC | |
| | | | AGTT[C/T]TGCATTGTGTCTGACATGCTCTTTCT | |
| | | | TTTGGGCGCAGGCTGAAGTGAATTACCTTGGA | |
| | | | CAACTATCGCACCCGAATCTTGTAAAGCTCGT | |
| | | | TGGGTACTGT | |
| 136H5_3M5_64154 | T | C | TGGCGGAGCTGGGGCTGTTCCTCCTACGCAGG | 3221 |
| | | | CGAAACTTCGCCGCGATAAA[T/C]GGAACTAT | |
| | | | CATCAGGTTCCCCGATGATCCATACG | |
| 136H5_3M5_68807 | A | G | ACAAGCAACCGAGACAAGTTGCTCTTAATTAT | 3222 |
| | | | CTGTGCGT[A/G]CACCTCTAAGTCTTAACCTGA | |
| | | | CGTAACCAACCAACCGTGT | |
| 136H5_3M5_77916 | A | G | GATGGTTACAAGGCATGCATAGCAAGTAGAGT | 3223 |
| | | | TAACTTATCAAGTTATT[A/G]GTATTTTTCTTCT | |
| | | | GTGGTACTTAGAGTCTAMAGCTTGAGC | |
| cfn1246088 | A | C | AATGGAAGCTGATGTGCGTTAGCGATAAAGCA | 3224 |
| | | | ACAGCGATAACGACGCATGGATCACCATGCTA | |
| | | | CTTGGGGAAGCAGGGACATCTGATGAGCCAG | |
| | | | CATAC[A/C]CCCAGATATGTGTCTTTCCAAATT | |
| | | | CCACGTCCCAACAGATGAGCTATAAATTAATG | |
| | | | CCACCTTCCTCCTACAGCTAAATACTCCATCCG | |
| | | | TTTCATAATGT | |
| cfn1287194 | G | A | CAGAGGCATTCGTGAATTGGGCGAAATCAGA | 3225 |
| | | | AGCAAGGAGCAGCGATGTTCAGCGCAGAAGG | |
| | | | CACTGGGAGGGGATTCCAGGGAGGCTGCCCA | |
| | | | CCAGCCC[G/A]CCATCAGATACGGAGGAGGTG | |
| | | | GATCCATGGCCCTACCTGTGTCCTGCGCCGAA | |
| | | | TCTGGACTGTGGTAACTACAGCGCCTGAATCT | |
| | | | AGAGGTTCAGCCTGG | |
| cfn1258380 | A | C | GATCCATCTCCCTTAATAATTTTGCTATTGGTA | 3226 |
| | | | TTGGGTATGGACATCTGAAGTGAAGGTTACGG | |
| | | | CCGATTTATAGGAGTGATAGCACCACACAATT | |
| | | | CAT[A/C]AGAGCATCTGCAATAGATGAGTAGA | |
| | | | TGTAAAACTACTTAACTTTTACATCTCCGGGCC | |
| | | | TAAAAACGCATCTGTAATAAGATAATGTAGAT | |
| | | | GTAAAGAAAA | |
| IWB72107 | A | G | CGACGACGACGAGGATGCCGAGTTTGATGAC | 3227 |
| | | | ATGGAGGATTATATCGACG[A/G]cgcggactgggacg | |
| | | | ccgacatgtatgatgatgtgttcgatgtctgaagga | |
| BS00090770 | C | T | TAGCCGTAGGTCGTAGCACATAGCCGTTTA[C/T] | 3228 |
| | | | GTAATGCATAGTTGTCCGAAGGAATGTTTC | |
| cfn1239345 | A | G | TAACCTGGGGCTTCTTTTTTCTCCCTATAATAT | 3229 |
| | | | GG[A/G]CTGCCCTTTTAAGAAGGAACTGCAGC | |
| | | | GAGGGTGCA | |
| cfn0917304 | G | T | GACTACGCGTTCCTCCCGGTGGTGGCGCTCTA | 3230 |
| | | | CCC[G/T]TTGTGTTGCCTTTCTCCAAGCAGTTGT | |
| | | | GCCCTTCG | |
| cfn0919993 | G | T | ATATCTTTACAAGTCATCGACTTACATGCTTCT | 3231 |
| | | | TT[G/T]TATTATATGCACCTATGCAGTACTTGTT | |
| | | | AATGGGT | |
| cfn0920459 | C | G | GATGATATAACCGTAGCCAAGGAAGCCCAGA | 3232 |
| | | | TTTT[C/G]TTCTGTGTATCTATAGGAGCTTAATT | |
| | | | AGGAGGAGG | |
| cfn0393953 | C | T | AGTATATAAAAAAACAAGTTGTCACCCAGATG | 3233 |
| | | | AAT[C/T]CGAAACTATGTCAATGTCGACGGTGA | |
| | | | GTGTGGACC | |
| cfn0856945 | G | T | GGACATCGGCACATGCTTTATTACTGATCTGA | 3234 |
| | | | TTT[G/T]TTGACTGTTTATTTTAGGTTTGCCTAC | |
| | | | ACCACTGA | |
| cfn1291249 | T | G | ATGGTTGAATATGTGACTGCATTTGGACTCAC | 3462 |
| | | | TCCTTGTTTCTGCATTTCATTGAAGATAAGCAT | |
| | | | GGCCTTATCAAGCTTCCCAGATTTAGCATGTG | |
| | | | CAT[T/G]AATCAGTATGTTGAAGATACGACAGT | |
| | | | CAGGTAGAATGCAGTATCTTTCCATTGAATTG | |
| | | | AAGAGATTAATCATATCAACTAAGCATCCTTC | |
| | | | GGTGGCATAC | |
| cfn0231871 | G | T | GGAGGCGCCTACTGTATTAAATTAGCTAGTGT | 3463 |
| | | | GGC[G/T]TGTTTGAGGATAATGGCACATATACC | |
| | | | TTGGCGGTG | |
| cfn0867742 | G | T | TCCAGGCAGGGGGCATCCTCGACAATGATTTC | 3464 |
| | | | ATC[G/T]AAGCTGCATCCCCATTCCATCACGAC | |
| | | | GCGGAGGCT | |
| cfn0523990 | G | T | TGTAAGCTAACTATACATGAAGAGTGCAGGCA | 3465 |
| | | | CAC[G/T]AAAACGTTCATCCTGAAGTACAAGA | |
| | | | GTTATTTTGG | |
| cfn3126082 | A | C | GGAGAAAGGCGAGATTTTAGCACCTAACGCC | 3466 |
| | | | GCAA[A/C]CCAGATCAAATCGCTGTCCCTTT | |
| W90K_RAC875_ | A | G | AACCTTGGAAGCTATCATTGCGCACTTGAAGA | 3467 |
| c33564_120 | | | GCA[A/G]TAGTGTGGACATTCCTGTTTATGCTT | |
| | | | GGAGCTTAG | |
| cfn3407185 | A | G | CGCAGGCAGCGGGCATGTATCCTCGTCTGACG | 3468 |
| | | | GAT[A/G]CCCAGATTATTAAACTGTCACCCTGC | |
| | | | ACGCCTGCA | |
| S100069923 | G | A | GAGGCTAATCCCGACGTGCCACATTGAGCACG | 3469 |
| | | | TGTGTTCTTGCTGTGGCCTGGTCGAAAGACAT | |
| | | | GACGCATGCACGTGCCCCACGCCTCACACGGC | |
| | | | TTGGGTTCTCGCCTGTCCGGTGCTCGACGGAC | |
| | | | CAGTACATATACGCGAGCGCTCCT[G/A]GCCA | |
| | | | CCTCAGTTCATCACACTTCACTGCAGTACAAG | |
| | | | GCCTCGGCTCTCGGCAGACTCCTCATTGCTGCT | |
| | | | TCTGCTAGTGAAAAGAGAGATTCTTCAGCGCT | |
| | | | GCTCCTGAAAGAGATAAGAAATACGATGGCA | |
| | | | ACAATGGTCAGAG | |
| S3045171 | G | A | ACTTACTGCGCGCAGACGTTGCAGCTCTTCCT | 3470 |
| | | | GCAGAAGCCAGGAGCTTCCTTGGTGCCCACCA | |
| | | | TATAGTTGGGGTTCTTGGCACACTCCCCA[G/A] | |
| | | | CGGCAGCCCACTGCGAGCAGAGGACATTCTCG | |
| | | | TCCTCGCAGCCGTCACCGGAGCCT | |
| S3045222 | T | C | AAGCAAGCTACGCGTTGCTCAAAAAAAAAAA | 3471 |
| | | | AAGCAAGCAAGCTACGCTGATCAAAGGCTGA | |
| | | | ATAGTCCAGAGTTACAGGACATGGCTACTCTG | |
| | | | CAGC[A/G]CCCAGCAAGCTTACTACTTAGGTTG | |
| | | | GTGGAGAAGCAGCACCCACTCGAGACTCGAC | |
| | | | AAGCAACCTTGGACGTTCTACTCGCCAGTGCA | |
| | | | TTGCTGCTTTACC | |
| cfn1087371 | A | G | ACCAGAGAAAGAGAGGGGAACTTTGGGTATA | 3472 |
| | | | CACC[A/G]CATTACCCTAGTGAAAGAAGAAGG | |
| | | | GGGTATTATGT | |
| cfn0436720 | A | G | GAAGGGTCCACTGAGAATTAAGGATGCATTCT | 3473 |
| | | | TTC[A/G]ATTTGGTATATTTGTTGTAAGGAATG | |
| | | | AAGAATCGG | |
| S100067637 | G | C | TTTCGTGGCGGGGGATCTCGTGCCGGTCGAGG | 3474 |
| | | | AGGTCCACCTCCAGCGAATTCTGCAGCAACCA | |
| | | | ACACAAACAGGCCCAAATGTCCGAATTCAGA | |
| | | | GCA[C/G]AGCCCGACCGACCGACCGCGAAATC | |
| | | | GCGCGGCATGGCGTTGGCGTTTGGCGTTGGCG | |
| | | | AGAAGGAAAAAGGCACTCTATGCAGACCTTA | |
| | | | GCTTGGTTATGGC | |
| cfn0554333 | C | G | TTGCCAAATTCACACCATCATTGATCTGGGGT | 3475 |
| | | | ATC[C/G]TATGCCTATGTGATGCCTCTCACCTC | |
| | | | TTTCTTCCC | |
| cfn0238384 | C | G | CCGTGAAACCTGTAAAAAGATGTCTGTGTGTC | 3476 |
| | | | TAG[C/G]AAAGCCCTAATTTTAATCACCCCGTA | |
| | | | CGCCCCCCT | |
| cfn0530841 | C | T | GCAGCTTCTTGTTTATATATTCTCTTATCAGAA | 3477 |
| | | | GT[C/T]GGGTAGAACAGCTAACGATGTGCTGCT | |
| | | | CATTTCCT | |
| cfn1082074 | C | T | TGATCTTACTGATAAAATCCGGTTCAAATATA | 3478 |
| | | | TAA[C/T]GGTGAGAAAAAATTAACCAGAGCGA | |
| | | | GGCGAGACAT | |
| cfn0560679 | C | T | GTTCATGTACAATGATGTTTAACATTGGAACG | 3479 |
| | | | GTC[C/T]GGGATCTGTTTGATCTATGCCCCCTT | |
| | | | CAACGTCTT | |
| cfn0915987 | G | T | AAGTCTGCCATCCAGATCATTACCCAACGGCC | 3445 |
| | | | AAT[G/T]GAGCCATGAGGTTTGCCTCGTTGCAC | |
| | | | GTTTTGGCT | |
| cfn0920253 | A | C | GCAACAAAGCTGGTCATCCAAACATTTACATC | 3446 |
| | | | GTT[A/C]GGCAGGCTTTCCGCCCAAACCATGCG | |
| | | | GCCGACCTG | |
| cfn0448874 | C | T | TATGTAAAACCTCTTTGTTTCTAAATAGCTGCG | 3447 |
| | | | GC[C/T]CGCTACCTAAATTTATGTTGAACCTAG | |
| | | | AGGCACCC | |
| cfn0923814 | A | C | GTTCGGCAGAATCCAAGTCGCAAATGTAAGGT | 3448 |
| | | | CAG[A/C]AAATGAATGATGATCATGATAATGA | |
| | | | AAATCATAAG | |
| cfn0924180 | A | G | ACGTATGGAGCTTCCTCTTTTCATCATGCACCA | 3449 |
| | | | TT[A/G]TGATCTCCCTCTTATTTTGTCTGAAGCC | |
| | | | ATTCATG | |
| cfn0919484 | A | G | AGGTCATGAAAATGCAAGTGGCGAATCTTATC | 3450 |
| | | | TCT[A/G]TTATACCATTTGGCAAAACAAAGGCG | |
| | | | AGAGTTCTG | |

### Example 19: Test of the Cumulative Effect of Rf Genes

[0449] To test the hypothesis of the cumulative effect of the restorer alleles and to identify the combination(s) of Rf genes that can produce a full fertility in the CMS hybrid, the SNPs linked to the 4 major loci mapped are used to create restorer lines combining the different restoring alleles. The 2 Rf alleles, 3 Rf alleles and 4 Rf alleles combinations (Rf1+Rf3, Rf1+Rf4, Rf1+Rf7, Rf3+Rf4, Rf3+Rf7, Rf4+Rf7, Rf1+Rf3+Rf4, Rf1+Rf3+Rf7, Rf3+Rf4+Rf7 and Rf1+Rf3+Rf4+Rf7) can be created employing different breeding techniques such as pedigree breeding, backcross, single-seed descent or double haploid.

[0450] In the example exposed 2 double-haploid lines from the cross TJB155/R204 were created: LGWR16-0016 and LGWR16-0026. Those two lines carry the restorer alleles Rf1, Rf7 (donor R204) and Rf3 (donor TJB155) and are alloplasmic for the cytoplasm from T. timopheevii (donor TJB155).

[0451] LGWR16-0016 and LGWR16-0026 have winter growth habits and show a normal fertility (LGWR16-0016: 2.54 seeds/spikelet, average over 29 individual spikes. LGWR16-0026: 2.33 seeds/spikelet, average over 40 individual spikes). LGWR16-0016 and LGWR16-0026 were used as pollinators in a series of crosses onto a series of A-line with elite background (14 A-lines for LGWR16-0016 and 16 A-lines for LGWR16-0026). The F1 plants originating from those crosses were assessed indoor for their fertility.

Fertility Assessment with the Main Tillers

[0452] The spikes from the hybrids produced with the restorer lines LGWR16-0016 yielded on average 45.4 grains and did show an average fertility of 2.44 grains/spikelet. The spikes from the hybrids produced with the restorer lines LGWR16-0026 yielded on average 44.7 grains and did show an average fertility of 2.37 grains/spikelet. Neither of these two groups differ significantly in their fertility distribution from the group formed by the elite lines (Table 20. T-test, P-values <0.05). The distribution of the fertility scores are, as a consequence, relatively similar between groups (see Table 20)

TABLE 20
fertility (expressed as number of seeds/spikelet) of a series
of spikes from hybrids produced with the restorers lines LGWR16-
0016 and LGWR16-0026 and from a panel of elite lines. The average
number of seeds per spike are indicated in the column “SEEDS”. The
standard deviation “STD. DEV.” are given for each of
the three groups. The T-test p-value “P-Value” is given
for the two groups of hybrids produced with LGWR16-0016 and
LGWR16-0026: it indicates the statistical significance of the
difference for the value “Fertility” between the group
of hybrids ad the group of elite lines The spikes originate
from the tallest tiller(s).

| | | | | STD. | P- |
|---|---|---|---|---|---|
| | SPIKES | SEEDS | FERTILITY | DEV. | VALUE |
| LGWR16-0016 | 164 | 45.4 | 2.44 | 0.43 | 0.090 |
| LGWR16-0026 | 206 | 44.7 | 2.37 | 0.45 | 0.692 |
| ELITES inbred | 637 | 44.1 | 2.36 | 0.59 | |

Fertility Assessment with all Tillers from F1 Plants

[0453] To be considered as complete, the restoration of fertility has to be observed in all the spikes formed by the hybrid plant. For that purpose, the integrality of the spikes of 56 F1 plants produced with LRWG16-0016, of 61 F1 plants produced with LGWR16-0026 and of 52 elite lines were assessed for their fertility and represent, per group, 294, 262 and respectively 288 individual spikes (Table 21). The 56 F1 plants produced with LGWR16-0016 produced on average 41.4 grains/spikes and did show an average fertility of 2.21 grains per spikelet (standard deviation 0.32). The 61 F1 plants produced with LGWR16-0026 produced on average 42.8 grains/spikes and did show an average fertility of 2.27 grains per spikelet (Table 5. Standard deviation 0.32). The fertility distribution of these two groups differ significantly from the fertility distribution of the groups formed by the elite lines (average number of seeds per spike: 38.4. Average fertility:2.01. Standard deviation 0.44. see Table 21).

TABLE 21
average spike fertility (expressed as number of seeds/spikelet)
of individual plants from hybrids produced with the restorers
lines LGWR16-0016 and LGWR16-0026 and from a panel of elite
lines. The average number of seeds per spikes are indicated
in the column “SEEDS”. The standard deviation “STD.
DEV.” are given for each of the three groups. The T-test
p-value “P-Value” is given for the two groups of hybrids
produced with LGWR16-0016 and LGWR16-0026: it indicates the
significance of the statistical difference for the value “Fertility”
between the group of hybrids ad the group of elite lines. On
average the F1 plants produced with the restorer lines LGWR16-
0016 and LGWR16-0026 formed 5.25 and respectively 4.3 spikes
and the plants from the elite lines group formed on average 4.35 spikes.

| | | | | STD. | P- |
|---|---|---|---|---|---|
| | PLANTS | SEED | FERTILITY | DEV. | VALUE |
| LGWR16-0016 | 56 | 41.4 | 2.21 | 0.32 | 0.003 |
| LGWR16-0026 | 61 | 42.8 | 2.27 | 0.32 | 0.000 |
| ELITES inbred | 52 | 38.4 | 2.01 | 0.44 | |

### Example 20: Development of Restorer Lines from Different Sources

[0454] With the help of the markers developed in the previous examples, new restorer lines comprising Rf1, Rf3 and Rf7 loci were obtained using different sources of restoration locus. Table 22 shows the list of these restorer lines and their characteristics.

[0455] LGWR17-0015 is a winter wheat double haploid line produced from the F1 plants from a complex cross: R0934F was first pollinated by Altigo, the created F1 R0934F/Altigo was then crossed with the F1 R197/Apache taken as male and the resulting four ways F1 “R0934F/ALTIGO//R197/APACHE” was then pollinated with the line Altamira. LGWR17-0015 inherited the T-CMS cytoplasm from the restorer line R0934F.

[0456] LGWR17-0015 has been selected under local environment and is a fully fertile wheat line.

[0457] LGWR17-0022 and LGWR17-0157 are winter wheat double haploid lines arising from a complex cross: the F1 formed from the cross between the restorer lines R204 and R213 was pollinated with Aristote, the resulting 3-ways cross “R204/R213//Aristote” was then pollinated with the line NIC07-5520. LGWR17-0022 and LGWR17-0157 inherited the T-CMS cytoplasm from the restorer line R204. They have both been selected under local environment and are fully fertile wheat lines.

[0458] LGWR17-0096 and LGWR17-0154 are winter wheat lines developed by conventional pedigree breeding technique from the 3-ways cross R204/R213//ARISTOTE. LGWR17-0096 and LGWR17-0154 inherited the T-CMS cytoplasm from the restorer line R204. They have both been selected under local environment and are fully fertile wheat lines.

[0459] All lines have been genotyped with the markers as described above to check for the presence of Rf1, Rf3 and Rf7 haplotypes.

[0460] Representative seed samples for each line have been deposited before NCIMB collection.

TABLE 22
Full restorer lines data regarding pedigree, the process of selection,
Rf haplotype identified by markers and
NCIMB deposit number“HD”: homozygous
plant obtained after a Double Haploid process, “F6”: homozygous
plant obtained through six generations of self-crosses.

| | | SE- | | NCIMB |
|---|---|---|---|---|
| | | LEC- | HAPLOTYPE | deposit |
| CODE | PEDIGREE | TION | Rf | number |
| LGWR16- | TJB155/R204 | HD | Rf1 + Rf3 + Rf7 | NCIMB |
| 0016 | | | | 42811 |
| LGWR16- | TJB155/R204 | HD | Rf1 + Rf3 + Rf7 | NCIMB |
| 0026 | | | | 42812 |
| LGWR17- | R0934F/ALTIGO//R197/ | HD | Rf1 + Rf3 + Rf7 | NCIMB |
| 0015 | APACHE///ALTAMIRA | | | 42813 |
| LGWR17- | R204/R213//ARISTOTE/// | HD | Rf1 + Rf3 + Rf7 | NCIMB |
| 0022 | NIC07-5520 | | | 42814 |
| LGWR17- | R204/R213//ARISTOTE | F6 | Rf1 + Rf3 + Rf7 | NCIMB |
| 0096 | | | | 42815 |
| LGWR17- | R204/R213//ARISTOTE | F6 | Rf1 + Rf3 + Rf7 | NCIMB |
| 0154 | | | | 42816 |
| LGWR17- | R204/R213//ARISTOTE/// | HD | Rf1 + Rf3 + Rf7 | NCIMB |
| 0157 | NIC07-5520 | | | 42817 |

### Example 21: Test of the Cumulative Effect of Rf1, Rf3 and Rf7 Genes Outdoor

[0461] Fertility from 4 hybrids produced with the restorer lines LGWR17-0022, LGWR17-0153, LGWR17-0154 and LGWR17-0157 was assessed in field as described in example 19 for the fertility assessment of the main tillers. The restorer lines have the pedigree and haplotypes as described in table 23.

[0462] The assays are made with agronomically adapted hybrids in three different countries France, Germany and United Kingdom. In total 28 hybrids are tested and compared to 26 control Elite inbreds. The result show that, in the field, the hybrids comprising the combination of the three alleles Rf1, Rf3 and Rf7 restorers performed as well as the elite inbreds (table 24). It is also worth to be noted that, in this combination, the Rf3 weak or Rf3 do not have any impact on the fertility level.

TABLE 23
pedigree and haplotype of the restorer lines

| | | | NCIMB |
|---|---|---|---|
| CODE | PEDIGREE | HAPLOTYPE Rf | deposit |
| LGWR17-0022 | R204/R213// | Rf1 + Rf3 + Rf7 | yes |
| | ARISTOTE///NIC07- | | |
| | 5520 | | |
| LGWR17-0153 | R204/R213//ARISTOTE | Rf1 + Rf3weak + | no |
| | | Rf7 | |
| LGWR17-0154 | R204/R213//ARISTOTE | Rf1 + Rf3weak + | yes |
| | | Rf7 | |
| LGWR17-0157 | R204/R213// | Rf1 + Rf3 + Rf7 | yes |
| | ARISTOTE///NIC07- | | |
| | 5520 | | |

TABLE 24
fertility (expressed as number of seeds/spikelet) of a series
of spikes from hybrids produced with the restorer lines
LGWR17-0022, LGWR17-0153, LGWR17-0154 and LGWR17-0157 and
from a panel of elite lines. Each spike originates from
the tallest tiller. The standard deviation “STD. DEV.”
are given for each of the three groups.

| | | | Fertility | |
|---|---|---|---|---|
| | | SPIKES | average | STD DEV. |
| Hybrids | Total | 169 | 2.71 | 0.47 |
| | Rf1 + Rf3weak + Rf7 | 43 | 2.72 | 0.38 |
| | Rf1 + Rf3 + Rf7 | 126 | 2.71 | 0.49 |

| | | | |
|---|---|---|---|
| Elite inbreds | 226 | 2.73 | 0.43 |

### Example 22: Modification of the Endogenous RFL29c Gene Sequence by CRISPR Technologies to Revert a Rf3 Allele to a Rf3 Allele

[0463] As shown in example 11, FIG. 5A and FIG. 12, RFL29c nucleotide sequence is characterized by a deletion of 2 nucleotides compared to RFL29a nucleotide sequence creating a frameshift and resulting in an inactive truncated protein. The sequence alignment in FIG. 12 shows that one “T” nucleotide in the RFL29c gene sequence could be removed or 2 nucleotides added in order to reframe the RFL29c gene sequence into a complete and functional RFL29 protein.

[0464] Such modification could be achieved in Fielder, which comprises a RFL29c as depicted in SEQ ID NO 3457, by designing, as described in example 15, a suitable guide sequence targeting the frameshift and used it in combination with a base-editing technology such as described in WO2015089406. FIG. 12 shows suitable PAM motif and target sequence for CRISPR cas9 edition.

### BIBLIOGRAPHY

[0465] Ahmed et al, 2001. QTL analysis of fertility restoration against cytoplasmic male sterility in wheat. Genes Genet Syst, 76:33-38.
[0466] Bahl P N, Maan S S, 1973. Chromosomal location of fertility restoring genes in six lines of common wheat. Crop Sci 13: 317-320.
[0467] Bennetzen J L et al, 2012. Reference genome sequence of the model plant Setaria. Nat Biotechnol 30 (6):555-+. doi:10.1038/nbt.2196
[0468] Brenchley R, et al, 2012. Analysis of the bread wheat genome using whole-genome shotgun sequencing. Nature 491 (7426):705-710. doi:10.1038/nature11650
[0469] Cannarozzi G, et al, 2014. Genome and transcriptome sequencing identifies breeding targets in the orphan crop tef (Eragrostis tef). Bmc Genomics 15. doi:Artn 58110.1186/1471-2164-15-581
[0470] Chen J F et al, 2013. Whole-genome sequencing of Oryza brachyantha reveals mechanisms underlying Oryza genome evolution. Nature Communications 4. doi:ARTN 159510.1038/ncomms2596
[0471] Cheng S F, Gutmann B, Zhong X, Ye Y T, Fisher M F, Bai F Q, Castleden I, Song Y, Song B, Huang J Y, Liu X, Xu X, Lim B L, Bond C S, Yiu S M, Small I (2016) Redefining the structural motifs that determine RNA binding and RNA editing by pentatricopeptide repeat proteins in land plants. Plant Journal 85 (4):532-547. doi:10.1111/tpj.13121.
[0472] Christensen A H and Quail P H, 1996. Ubiquitin promoter-based vectors for high-level expression of selectable and/or screenable marker genes in monocotyledonous plants. Transgenic Res, May; 5(3):213-8.
[0473] Christian et al, 1992. Maize polyubiquitin genes: structure, thermal perturbation of expression and transcript splicing, and promoter activity following transfer to protoplasts by electroporation. Plant Mol Biol. 18(4):675-89.
[0474] Curtis and Lukaszewski, 1993. Localization of genes in Rye that restore male fertility to hexaploid wheat with timopheevii cytoplasm. Plant breeding, 11:106-112.
[0475] Depigny-This D et al, 1992. The cruciferin gene family in radish. Plant Molecular Biology, 20: 467-479.
[0476] Fehr W R et al, 1987. Principles of Cultivar Development Vol. 1 Theory and Technique. Macmillan, New York.
[0477] Fujii S, Bond C S, Small I D (2011) Selection patterns on restorer-like genes reveal a conflict between nuclear and mitochondrial genomes throughout angiosperm evolution. P Natl Acad Sci USA 108 (4):1723-1728. doi:DOI 10.1073/pnas.1007667108.
[0478] Geyer M et al, 2016. Distribution of the fertility-restoring gene Rf3 in common and spelt wheat determined by an informative SNP marker. Mol Breeding, 36:167. DOI 10.1007/s11032-016-0592-6.
[0479] Götz H et al, 2011. Transgene Expression Systems in the Triticeae Cereals. Journal of Plant Physiology 168, no. 1: 30-44. doi:10.1016/j.jplph.2010.07.007.
[0480] International Brachypodium I (2010) Genome sequencing and analysis of the model grass Brachypodium distachyon. Nature 463 (7282):763-768. doi:10.1038/nature08747
[0481] Jacquemin J, et al, 2013. The International Oryza Map Alignment Project: development of a genus-wide comparative genomics platform to help solve the 9 billion-people question. Curr Opin Plant Biol 16 (2):147-156. doi:10.1016/j.pbi.2013.02.014.
[0482] Jefferson, R. A., 1987. Assaying chimeric genes in plants: The GUS gene fusion system. Plant Mol. Biol. Report. 5, 387-405. DOI:10.1007/BF02667740
[0483] Jia J, et al, 2013. Aegilops tauschii draft genome sequence reveals a gene repertoire for wheat adaptation. Nature 496 (7443):91-95. doi:10.1038/nature12028.
[0484] Jones H D, 2015. Wheat Biotechnology: Current Status and Future Prospects. K. Azhakanandam et al. (eds.), Recent Advancements in Gene Expression and Enabling Technologies in Crop Plants, DOI 10.1007/978-1-4939-2202-4_8.
[0485] Kay R, et al 1987. Duplication of CaMV 35S promoter sequences creates a strong enhancer for plant genes. Science 236:1299-1302.
[0486] Kawahara Y et al, 2013. Improvement of the Oryza sativa Nipponbare reference genome using next generation sequence and optical map data. Rice 6. doi:Artn 410.1186/1939-8433-6-4.
[0487] Kihara, 1951, Genome analysis in Triticum and Aegilops X. Concluding review. Cytologia, 16: 101-123.
[0488] Kojima et al, 1997, High-resolution RFLP mapping of the fertility restoration (Rf3) gene against Triticum timopheevii cytoplasm located on chromosome 1BS of common wheat. Genes Genet Syst, 72: 353-359.
[0489] Krasileva K V et al, 2013. Separating homeologs by phasing in the tetraploid wheat transcriptome. Genome Biol 14 (6). doi:ARTN R66 10.1186/gb-2013-14-6-r66.
[0490] Li et al, 2003. OrthoMCL: Identification of Ortholog Groups for Eukaryotic Genomes. Genome Res. 2003 September; 13(9): 2178-2189.
[0491] Li H. and Durbin R, 2010. Fast and accurate long-read alignment with Burrows-Wheeler Transform. Bioinformatics, Epub. [PMID: 20080505]
[0492] Ling H Q et al, 2013. Draft genome of the wheat A-genome progenitor Triticum urartu. Nature 496 (7443):87-90. doi:10.1038/nature11997
[0493] Longin et al, 2012, Hybrid breeding in autogamous cereals. Theor Appl Genet.: 125:1007-1096. DOI 10.1007/s00122012-1967-7.
[0494] Ma Z Q and Sorrells M E, 1995, Genetic analysis of fertility restoration in wheat using RFLP. Crop Sci., 35:1137-1143.
[0495] Mace E S et al, 2013. Whole-genome sequencing reveals untapped genetic potential in Africa's indigenous cereal crop sorghum. Nat Commun 4:2320. doi:10.1038/ncomms3320.
[0496] McElroy D et al, 1990. Isolation of an Efficient Actin Promoter for Use in Rice Transformation. The Plant Cell, Vol. 2, 163-171.
[0497] Martis M M et al, 2013. Reticulate Evolution of the Rye Genome. Plant Cell 25 (10):3685-3698. doi:10.1105/tpc.113.114553
[0498] Mayer K F X, et al, 2014. A chromosome-based draft sequence of the hexaploid bread wheat (Triticum aestivum) genome. Science 345 (6194). doi:ARTN 125178810.1126/science.1251788
[0499] Mayer K F X et al, Conso I B G S, 2012. A physical, genetic and functional sequence assembly of the barley genome. Nature 491 (7426):711-+. doi:10.1038/nature11543.
[0500] Ouyang S et al, 2007. The TIGR Rice Genome Annotation Resource: Improvements and new features. Nucleic Acids Res 35:D883-D887. doi:10.1093/nar/gkl976.
[0501] Pallavi Sinha P et al 2013. Genetic analysis and molecular mapping of a new fertility restorer gene Rf8 for Triticum timopheevii cytoplasm in wheat (Triticum aestivum L.) using SSR markers. Genetica, 141: 131-141.
[0502] Paterson A H et al, 2009. The Sorghum bicolor genome and the diversification of grasses. Nature 457 (7229):551-556. doi:10.1038/nature07723.
[0503] Rathburn and Hedgcoth, 1991. Chimeric open reading frame in the 5′ flanking region of coxl mitochondrial DNA from cytoplasmic male-sterile wheat. Plant Mol. Biol., 16:909-912.
[0504] Rice P et al, 2000. A. EMBOSS: The European molecular biology open software suite. Trends Genet 16, 276-277, 10.1016/S0168-9525(00)02024-2.
[0505] Sakai H, et al, 2013. Rice Annotation Project Database (RAP-D B): An Integrative and Interactive Database for Rice Genomics. Plant Cell Physiol 54 (2):E6-+. doi:10.1093/pcp/pcs183.
[0506] Schnable P S, et al, 2009. The B73 Maize Genome: Complexity, Diversity, and Dynamics. Science 326 (5956):1112-1115. doi:10.1126/science.1178534.
[0507] Singh S K et al, 2010. Perspective of hybrid wheat research: a review. Indian J Agric Sci 80:1013-1027.
[0508] Song and Hedgcoth, 1994. Influence of nuclear background on transcription of a chimeric gene orf256 and cox1 in fertile and cytoplasmic male sterile wheats. Genome, vol. 37
[0509] Stojalowski S et al, 2013. The importance of chromosomes from the sixth homeologic group in the restoration of male fertility in winter triticale with Triticum tomopheevii cytoplasm. J. Appl. Genetics, 54:179-184.
[0510] Verdaguer et al, 1996. Isolation and expression in transgenic tobacco and rice plants, of the cassava vein mosaic virus (CVMV) promoter. Plant Molecular Biology 31: 1129-1139.
[0511] Wang M H et al, 2014. The genome sequence of African rice (Oryza glaberrima) and evidence for independent domestication. Nat Genet 46 (9):982-+. doi:10.1038/ng.3044Wilson J A, Ross W M. 1962. Male sterility interaction of the Triticum aestivum nucleus and Triticum timopheevii cytoplasm. Wheat Information Service (Kyoto) 14: 29-30.
[0512] Wilson J A, Ross W M. 1962. Male sterility interaction of the Triticum aestivum nucleus and Triticum timopheevii cytoplasm. Wheat Information Service (Kyoto) 14, 29-30.
[0513] Wilson, 1984. Hybrid wheat breeding and commercial seed development. Plant Breeding Rev., 2: 303-319. 2
[0514] Whitford R et al, 2013. Hybrid breeding in wheat: technologies to improve hybrid wheat seed production. Journal of Experimental Botany. doi:10.1093/jxb/ert333.
[0515] Zhou et al, 2005. SSR marker associated with fertility restoration genes against Triticum timopheevii cytoplasm in Triticum aestivum. Euphytica, 141:33-40.

The application's sequence listing, which the Patent Office published only in electronic form, follows.

SEQUENCE LISTING (3479 sequences)

SEQ ID NO: 1 - protein, 983 aa, Triticum aestivum
MLTNIGILKKIIPFYGFCGAFSRACNKFIFLVDIKFYSYRLGDTNIHIIILLYLKRTHILSLYQNIGRLYTWKSTRLAPISRPTTTKAMPRFSSTTPMSPLRLRLRRRLRARHSSSTSHSSRSWEPHAAFAAATERARSGNLTPEDAHHLFDELLRQGNPVQDRPLNKLLSALARAPASAACRNGPALAVALFSRISQGARRRVAEPTACTYTILMDCCCRAHRLDLALAFFGRLLRTGLKTGVIEVNTLLKGLCHSKRADEAMEVLLHRMPELGCTPDVVACNTVIHGFFKEGQVGKACNLFHEMGQHGVTPDVVTYNSVIDGLCKARAMDKAEVVLHQMLVNGVVPDKVTYGSLIDGYYSLAHWKEAVRLFEEMKSQRVTPDVHTYNLCIHGFFREGQVGKACNLFHEMGQQGVTPDVVTYNSVIDALCKARAMDKAEYFLRQMVDSGVVPNNVTYNSLIHGYSSSGYQKEAVRVLKEMTSQGIIPDVFTFNSLMASLSKNGRSKEAAEIFDSMAMKGLKPDIVSYNTLLHGYATEGCLVGMTNFFNSMTRDGIRPNCHTLNILINAYAKSGMMDEAMVIFKGMRKQGVSPDVVTYSTVIHGFCKIGRLDNAMVKFKQMTDMGVRPNPIVYHSLIQGFCTHGDLVKAKELVTEMRYKGMRPPDIKVFHLAMQNLCTEGRVTKARDILDLIVHIGMRPDVFTFSLLIGGYCLVCKMEDASKIFDDMVSYGLEPSNITYGILINGYCKNKRIDDGLILFKTMLHKGLKPTTFNYNVILDGLFLAGRTVAAKEKFNEMVESGVSVCIDTCSIVLGGLCKNSCSSEAITLFRKLSTMNVKFDINIVNIIIGAFYSVKRNQEAKDLFAAIPANGLVPNAVTYTIMMTNLIKEGSVEEADNLFLSMEKSGCTANSWMLNHIIRRLLERGEIVKAGNYMSKVDVKSYSLEAKTVSLLISLFSREGKYRDHIKLLPTKYQFLEEAATVE

SEQ ID NO: 2 - protein, 440 aa, Triticum aestivum
MTNLFNSMTRDGIRPNCHTLNILINAYAKSGMMDEAMLIFKGMRKQGVSPNVVTYSTVIHGFCKIGKLDNAMVKFKQMTDMGVRPNPIVYHSLIQGFCTHGDLVKAKELVTEMRYKGMRPPDIKVFHLAMQNLCTEGRVTKARDILDLIVHIGMRPDVFTFSILIGGYCLVCKMEDASKIFDDMVSYGLEPSNITYGILINGYCKNKRIDDGLILFKTMLHKGLKPTTFNYNVILDGLFLAGRTVAAKEKFNEMVESGVSVCIDTCSIVLGGLCKNSCSSEAITLFRKLSTMNVKFDINIVNIIIGAFYRVKRNQEAKDLFAAIPANGLVPNAVTYTIMMTNLIKEGSVEEADNLFLSMEKSGCTANSWMLNHIIRRLLERGEIVKAGNYMSKVDVKSYSLEAKTVSLLISLFSREGKYRDHIKLLPTKFQFLEEAATVE

SEQ ID NO: 3 - protein, 917 aa, Triticum aestivum
MRSCFCNRAFIAGCNEWACGAWTLHRTAISSCIQRSSRRRSKHRPGDLLQVTRTTILGRRREYVFVIKKKRVVYLHKQSNTGSSSKRLTSPVPSRLPRRSPMSSLHLLRHRSSSFTPTSPPSPSWSPHAAFTAATERVRAGTLSPEDAHHLFDQLLQQSTPVPEQALNGFLAALTRARAPDTEVCRDGPSLALTLFNRVWREEAGRRVALPTVRTYNILMNCCCRVRRPDLGLAYFGRLLRTSLKTNEVVANTVLMCLCCAKRTDEAVNVLLHRMSVLGCVPDEFSYNIVLKSLCKEGRSQQALNLLHVMAKGDGCSPDVVAYNTVIYGFFKEGEVGKACNLFHEMMRQGVVPDVVTYSSIIDALCKAGAMDKAELFLRQMVDNSVQPDTVTYTSMIHGYSTLGRWKEATKMLREMTSRGLIPNIVTWNSFMASLCKHGKSKEAAEIFFSMAARGHKPDIVSYTTLLHGYANEGSFADMMKLFNSMVGNGIVANCQVFNILIDAYAQRGMMDEAMLIFTEMPGQGVNPNVVTYSIVIAALCRMGRLADAMNKFSEMIGTGVQPNIVVYHSLVQGLCTHGDLVKAKVLISEMMNKGIARPNIAFFSSIMGSLCNEGRIMNAHDIFDLVTDIGVKPDVITFNMLMVGYCLVGEMEKAFKVLDAMVSVGIEPDVVTYSSLISGYCKTGRLDDGVTLFREMLHKRIKPDTVSYNTILDGLFNAGRTAAARKMFHEMIESGVMVSISTYNIILGGLCRNNCMDEAIVLFRKLRAVNVKFNITTLNTIINALYNVQRREEAHDLFAALPASRLVPNASTYRVMIDNLLKEGAVEEADSMFSSMEKSGCAPSSHFLNYIIRMLLEKGEIVKAGKYMSKVDGKIILLEASTTSLLMSLFSRGGKYQEHILLLPAKYHFFSGVNHS

SEQ ID NO: 4 - protein, 816 aa, Triticum aestivum
MSSLHLLRHRSSSFTPTSPPSPSWSPHAAFTAATERVRAGTLSPEDAHHLFDQLLQQSTPVPEQALNGFLAALTRARAPDTDVCRDGPSLALTLFNRVWREEAGRRVALPTVRTYNILMNCCCRVRRPDLGLAYFGRLLRTSLKTNEVVANTVLMCLCCAKRTDEAVNVLLHRMSVLGCVPDEFSYNIVLKSLCKEGRSQQALNLLHVMAKGDGCSPDVVAYNTVIYGFFKEGEVGKACNLFHEMMRQGVVPDVVTYSSIIDALCKAGAMDKAELFLRQMVDNSVQPDTVTYTSMIHGYSTLGRWKEATKMLREMTSRGLIPNIVTWNSFMASLCKHGKSKEAAEIFFSMAARGHKPDIVSYTTLLHGYANEGSFADMMKLFNSMVGNGIVANCQVFNILIDAYAQRGMMDEAMLIFTEMPGQGVNPNVVTYSIVIASLCRMGRLADAMNKFSEMIGTGVQPNIVVYHSLVQGLCTHGDLVKAKVLISEMMNKGITRPNIAFFSSIMGSLCNEGRIMNAHDIFDLVTDIGVKPDVITFNMLMVGYCLVGEMEKAFKVLDAMVSVGIEPDVVTYSSLISGYCKTGRLDDGVTLFREMLHKRIKPDTVSYNTILDGLFNAGRTAAAKKMFHEMIESGVMVSISTYNIILGGLCRNNCMDEAIVLFRKLRAVNVKFNITTLNTIINALYNVQRREEAHDLFAALPASRLVPNASTYRVMIDNLLKEGAVEEADSMFSSMEKSGCAPSSHFLNYIIRMLLEKGEIVKAGKYMSKVDGKIILLEASTTSLLMSLFSRGGKYQEHILLLPAKYHFFSGVNHS

SEQ ID NO: 5 - protein, 968 aa, Triticum aestivum
MAAAPRGLQLCRSRGQEYVVSVTERLLREITSGHAVLFSATERLLREVRVGMRSCFCNRAFIAGCNEWACGAWTLHRTAISSCIQRSSRRRSKHRPGDLLQVTRTTILGRRREYVFVIKKKRVVYLHKQSNTGSSSKRLTSPVPSRLPRRSPMSSLHLLRHRSSSFTPTSPPSPSWSPHAAFTAATERVRAGTLSPEDAHHLFDQLLQQSTPVPEQALNGFLAALTRARAPDTEVCRDGPSLALTLFNRVWREEAGRRVALPTVRTYNILMNCCCRVRRPDLGLAYFGRLLRTSLKTNEVVANTVLMCLCCAKRTDEAVNVLLHRMSVLGCVPDEFSYNIVLKSLCKEGRSQQALNLLHVMAKGDGCSPDVVAYNTVIYGFFKEGEVGKACNLFHEMMRQGVVPDVVTYSSIIDALCKAGAMDKAELFLRQMVDNSVQPDTVTYTSMIHGYSTLGRWKEATKMLREMTSRGLIPNIVTWNSFMASLCKHGKSKEAAEIFFSMAARGHKPDIVSYTTLLHGYANEGSFADMMKLFNSMVGNGIVANCQVFNILIDAYAQRGMMDEAMLIFTEMPGQGVNPNVVTYSIVIAALCRMGRLADAMNKFSEMIGTGVQPNIVVYHSLVQGLCTHGDLVKAKVLISEMMNKGIARPNIAFFSSIMGSLCNEGRIMNAHDIFDLVTDIGVKPDVITFNMLMVGYCLVGEMEKAFKVLDAMVSVGIEPDVVTYSSLISGYCKTGRLDDGVTLFREMLHKRIKPDTVSYNTILDGLFNAGRTAAARKMFHEMIESGVMVSISTYNIILGGLCRNNCMDEAIVLFRKLRAVNVKFNITTLNTIINALYNVQRREEAHDLFAALPASRLVPNASTYRVMIDNLLKEGAVEEADSMFSSMEKSGCAPSSHFLNYIIRMLLEKGEIVKAGKYMSKVDGKIILLEASTTSLLMSLFSRGGKYQEHILLLPAKYHFFSGVNHS

SEQ ID NO: 6 - protein, 917 aa, Triticum aestivum
MRSCFCNRAFIAGCNEWACGAWTLHRTAISSGIQRSSRRRYKHQPGDLLQVTRTTILGRRREYVFVIKKKRVVYLHKQSNTGSSSKRLTSPVPSRLPRRSPMSSLHLLRHRSSSFTPTSPPSPSWSPHAAFTAATERVRAGTLSPEDAHHLFDQLLQQSTPVPEQALNGFLAALTRARAPDTDVCRDGPSLALTLFNRVWREEAGRRVALPTVRTYNILMNCCCRVRRPDLGLAYFGRLLRTSLKTNEVVANTVLMCLCCAKRTDEAVNVLLHRMSVLGCVPDEFSYNIVLKSLCKEGRSQQALNLLHVMAKGDGCSPDVVAYNTVIYGFFKEGEVGKACNLFHEMMRQGVVPDVVTYSSIIDALCKAGAMDKAELFLRQMVDNSVQPDTVTYTSMIHGYSTLGRWKEATKMLREMTSRGLIPNIVTWNSFMASLCKHGKSKEAAEIFFSMAARGHKPDIVSYTTLLHGYANEGSFADMMKLFNSMVGNGIVANCQVFNILIDAYAQRGMMDEAMLIFTEMPGQGVNPNVVTYSIVIASLCRMGRLADAMNKFSEMIGTGVQPNIVVYHSLVQGLCTHGDLVKAKVLISEMMNKGITRPNIAFFSSIMGSLCNEGRIMNAHDIFDLVTDIGVKPDVITFNMLMVGYCLVGEMEKAFKVLDAMVSVGIEPDVVTYSSLISGYCKTGRLDDGVTLFREMLHKRIKPDTVSYNTILDGLFNAGRTAAAKKMFHEMIESGVMVSISTYNIILGGLCRNNCMDEAIVLFRKLRAVNVKFNITTLNTIINALYNVQRREEAHDLFAALPASRLVPNASTYRVMIDNLLKEGAVEEADSMFSSMEKSGCAPSSHFLNYIIRMLLEKGEIVKAGKYMSKVDGKIILLEASTTSLLMSLFSRGGKYQEHILLLPAKYHFFSGVNHS

SEQ ID NO: 7 - protein, 917 aa, Triticum aestivum; identical to SEQ ID NO: 6

SEQ ID NO: 8 - protein, 917 aa, Triticum aestivum; identical to SEQ ID NO: 3

SEQ ID NO: 9 - protein, 504 aa, Triticum aestivum
MLRKMTTRGLIPDIVTCSSLMTSLCKHGRSKEALDIFCSMTAKGLKPNIIAYSILLHGYATEGCFVDMINLFNSMEDNGIAANCYVFNILIDAYAKHGMMDEAMLIFTEMREKGVSPDVVTYSTVITAFCRLRRLADAMDKFNEMTDMGVQPDTTVYHSLIQGFCMHGDLVKAKGLVSEMTNKGIPRPDIVFFSSIINTLCKEGRVMDAQDIFEMVISIDGRPDVITFSSLIDGYGLVGQMGKALGVLDAMVSAGIEPDVVTYSSLLDGYCRNGRINDALILFREMPHKRIKPNTVTYGIILDGLFRAGRTVDARKMFHEMIERGITVSISIYNIILGGLCRNNCADEAIALFQKLGAMNVKFNIITLNTMINAMFKVRRREEANDLFAAISAGGLVPNASTYGIMIKNILKEGSVEEVDSMFSSMEKSGIIPNSCLINIIIRMLLEKGEIAKARNYLSKVDGKVISLEASTTSLLLSLFSRKGKYRESIELLPANYQFFDGFG

SEQ ID NO: 10 - protein, 697 aa, Triticum aestivum
MGCFCGARRPDLGLALFGHFLRTGLKTNKIVATTFLKCLCCAKRTDEAVNVLLHRMPELGCVPDAFSYSIVLKSLCENSMSQRALDLLQMVAKGGDACSVNVVAYNTVIHGFFKEGETGKACNLFHEMIHQGVVPDVVTFNSIIHALCKARAMDKAEIVLRQMVDNGAQPNEVTYNCMIHGYSKSGQLREGTKMLRKMTTRGLIPDIVTCSSLMTSLCKHGRSKEALDIFCSMTAKGLKPNIIAYSILLHGYATEGCFVDMINLFNSMEDNGIAANCYVFNILIDAYAKHGMMGEAMLIFTEMREKGVSPDVVTYSTVIAAFCRLRRLADAMDKFNEMTDMGVQPDTTVYHSLIQGFCMHGDLVKAKGLVSEMTNKGIPRPDIAFFSSIINTLCKEGRVMDAQDIFEMVISIDGRPDVITFSSLIDGYGLVGQMGKALGVLDAMVSAGIEPDVVTYSSLLDGYCRNGRINDALILFREMPRKRIKPNTVTYGIILDGLFRAGRTVDARKMFHEMIERGITVSISICNIILGGLCRNNCADEAIALFQKLGAMNVKFNIITLNAMINAMFKVRRREEANDLFAAISASGLVPNASTYGIMIKNILKEGSVEEVDSMFSSMEKSGIIPNSCLINIIIRMLLEKGEIAKAGNYLSKVDGKVISLEASTTSLLLSLFSRKGKYRESIELLPANYQFFDGFG

SEQ ID NO: 11 - protein, 1394 aa, Triticum aestivum
MGCFCGARRPDLGLALFGHFLRTGLKTNKIVATTFLKCLCCAKRTDEAVNVLLHRMPELGCVPDAFSYSIVLKSLCENSMSQRALDLLQMVAKGGDACSVNVVAYNTVIHGFFKEGETGKACNLFHEMIHQGVVPDVVTFNSIIHALCKARAMDKAEIVLRQMVDNGAQPNEVTYNCMIHGYSKSGQLREGTKMLRKMTTRGLIPDIVTCSSLMTSLCKHGRSKEALDIFCSMTAKGLKPNIIAYSILLHGYATEGCFVDMINLFNSMEDNGIAANCYVFNILIDAYAKHGMMGEAMLIFTEMREKGVSPDVVTYSTVIAAFCRLRRLADAMDKFNEMTDMGVQPDTTVYHSLIQGFCMHGDLVKAKGLVSEMTNKGIPRPDIAFFSSIINTLCKEGRVMDAQDIFEMVISIDGRPDVITFSSLIDGYGLVGQMGKALGVLDAMVSAGIEPDVVTYSSLLDGYCRNGRINDALILFREMPRKRIKPNTVTYGIILDGLFRAGRTVDARKMFHEMIERGITVSISICNIILGGLCRNNCADEAIALFQKLGAMNVKFNIITLNAMINAMFKVRRREEANDLFAAISASGLVPNASTYGIMIKNILKEGSVEEVDSMFSSMEKSGIIPNSCLINIIIRMLLEKGEIAKAGNYLSKVDGKVISLEASTTSLLLSLFSRKGKYRESIELLPANYQFFDGFGMGCFCGARRPDLGLALFGHFLRTGLKTNKIVATTFLKCLCCAKRTDEAVNVLLHRMPELGCVPDAFSYSIVLKSLCENSMSQRALDLLQMVAKGGDACSVNVVAYNTVIHGFFKEGETGKACNLFHEMIHQGVVPDVVTFNSIIHALCKARAMDKAEIVLRQMVDNGAQPNEVTYNCMIHGYSKSGQLREGTKMLRKMTTRGLIPDIVTCSSLMTSLCKHGRSKEALDIFCSMTAKGLKPNIIAYSILLHGYATEGCFVDMINLFNSMEDNGIAANCYVFNILIDAYAKHGMMGEAMLIFTEMREKGVSPDVVTYSTVIAAFCRLRRLADAMDKFNEMTDMGVQPDTTVYHSLIQGFCMHGDLVKAKGLVSEMTNKGIPRPDIAFFSSIINTLCKEGRVMDAQDIFEMVISIDGRPDVITFSSLIDGYGLVGQMGKALGVLDAMVSAGIEPDVVTYSSLLDGYCRNGRINDALILFREMPRKRIKPNTVTYGIILDGLFRAGRTVDARKMFHEMIERGITVSISICNIILGGLCRNNCADEAIALFQKLGAMNVKFNIITLNAMINAMFKVRRREEANDLFAAISASGLVPNASTYGIMIKNILKEGSVEEVDSMFSSMEKSGIIPNSCLINIIIRMLLEKGEIAKAGNYLSKVDGKVISLEASTTSLLLSLFSRKGKYRESIELLPANYQFFDGFG

SEQ ID NO: 12 - protein, 504 aa, Triticum aestivum; identical to SEQ ID NO: 9

SEQ ID NO: 13 - protein, 697 aa, Triticum aestivum; identical to SEQ ID NO: 10

SEQ ID NO: 14 - protein, 697 aa, Triticum aestivum; identical to SEQ ID NO: 10

SEQ ID NO: 15 - protein, 813 aa, Triticum aestivum
MSGVCLRRRLSSTSTSNTPPSPSWSPQAAFAAATERARAGTLSPQDAHHLFDELFRQATPVPERSLEGFLAALGRAASSEACRDGPSLALTLFNRLCREEAGRRVAPPTIYTYGILMNCCCRVRRPDLGLAFFGRLLRTGLKTNEVVASTLLKCLCCAKRADEAVNVLLHRMSVLGCVPNSFSYNIVLKSLCDDSRSQRALGLLQMMAKGGVCSPNVLSYNTVIHGFFKEGEIDKACNLFHEMTKQGFVPNVVTYNSVINALCKARAMDNAESFLRQMVDNGVPPDKVTYTSIIHGYSTLGRWKEATKMFREMTSRGLIPDIVTRNSFMDSLCKHGRSKEAAEIFFSMAARGHKPDIVSYTILLHGYGNEGSFSDMMSLFNSMEGGGIVADCQVFNILIDAYAKRGMIDEAMLIFTEMLGQGVNPSVVTYSTLIAALCRTGRLADAMDKFSQMVGTGVQPDTVVYHSLIQGFCTHGDLVKAKELISEMMNKGIICPNIAFFNSIVDSLCKEGRVMDAHHIFDLVKDIGEKPDAIMFNTLIDGYCLVGEMGKAFMVLDVMTSAGIEPDAITYSTLVSGYCKSGRIDDGLILFREEMLHKKVKPTIVTYNIILEGLFRAGRTVAAKKMLHEIIGSGTPVSMHTYDIFLRGLCRNNCADEAIVLFQKSRAMNVKFNITTLNTMINAFYKGDRREEANDLFAALPASGLVPNASTYGVMIQNLLKEGAVEEADNMFSSMEKSGCAPSSRLVNDVIRTLLEKGEIVKAGKYMSKVYGKSLSLDASTSSLLLSLFSGNGKYREQIQLLPAKYQFFGGIS

SEQ ID NO: 16 - protein, 813 aa, Triticum aestivum; identical to SEQ ID NO: 15

SEQ ID NO: 17 - protein, 813 aa, Triticum aestivum; identical to SEQ ID NO: 15

SEQ ID NO: 18 - protein, 813 aa, Triticum aestivum; identical to SEQ ID NO: 15

SEQ ID NO: 19 - protein, 813 aa, Triticum aestivum; identical to SEQ ID NO: 15

SEQ ID NO: 20 - protein, 813 aa, Triticum aestivum; identical to SEQ ID NO: 15

SEQ ID NO: 21 - protein, 608 aa, Triticum aestivum
MMAKGGVCSPNVLSYNTVIHGFFKEGEIGKACNLFHEMAKQGFVPNVVTYNSVINALCKARAMDNAESFLRQMVDNGVPPDKVTYTSIIHGYSTLGRWKEATKMFRETTSRGHIPDIVTRNSFMDSLCKHGRSKEAAEIFFSMAARGHKPDIVSCTILLHGYGNEGSFSDMMSLFNSMEGGGIVADCQVFNILIAAYAKRGMIDEAMLIFTEMLGQGVNPSVVTYSTLIAALCRTGRLADAMDKFSQMVDTGVQPDTVVYHSLIQGFCTHGDLVKAKELISEMMNKGMICPNIAFFNSIVDSLCKEGRVMDAHHIFDLVKDIGEKPDVIMFNTLIDGYCLVGEMGKAFMVLDVMTSAGIEPDAITYSTLVSGYCKSGRIDDGLILFREEMLHKKVKPTIVTYNIILEGLFRAGRTVAAKKMLHEIIGSGTPVSMHTYDIFLRGLCRNNCANEAIVLFQKSRAMNVKFNITTLNTMINAFYKGDRREEANDLFAALPASGLVPNASTYGVMIQILLKEGAVEEADNMFSSMEKSGCAPSSRLVNDVIRTLLEKGEIVKAGKYMSKVDGKSISLDASTSSLLLSLFSGNGKYREQIQLLPAKYQFFGGIS

SEQ ID NO: 22 - protein, 880 aa, Triticum aestivum
MLRRIRISTPVIGGKKAPVRTPDADAPRHPHPPPSPPLPLLHLAGVRSPPPSPPLVRLHQYRTTSTPMSRIHLHLHQHRRLFSSTSPPSRSWSPHEAFAAATERVRAGNFSWEDAHNLFDELLRQATPVPGRSLNGFLAALARAPASEACRDGPALALALFNHVCRDESGARVAPPTIFTYGILMNCCCRAHRPDLGLAFFGRLLRTGLKADLIVANTLLKCLCRAKRTDEAVNVLLHRMSELGCVPDAFSYSIVLKSLCDNGMSQQALNLLHMMAKVGGGCSPDVVAYSTVIHGFFKEGETGKACNLFHEMMQQGVEPNVWTYSSIIDALCKARAMDKAELVLQQMVNKGVQPDNVTYNCMIHGYSTSGRWKEAVKLFREMKSRGLIPDNFTCNSLMTYLCKHGRSKEGAEFFDAMTAKGHRDVISYYILLHGYANEGCFADMIDLFNSMERNGIAANCRVFNILINGHAKRGMTDEAMLIFTEMWEKGVSPNVVTYSTVIAALSRMGRLTDSMEKFNQMIAMGIQPNTAVYHSLIQGCFMHGGLVKAKELMFEMMNKGIPRPNIVFFSSVINSLCKEGRVMDAHAVFDLAIGIGERPNVITFNSLIDGYCLVGKMDKAFKILHVMESVGVESDVVTYSALLDGYFKNRRIDDALTLFREMPRKRIKPNTVTYGIMLGGLFHAGRTVAAMKMFHEMIESGATVRISTYNIILGGLCQTNCVDEAIALFQKLRAMNVKFNIEIFNTMIDAMYKVQRKEEAKELFAAISGNGLVPNEYTYAVMIRNLLKGGAVEDADNMFSSMDNSGIVPSSRLINDIIRMLLEKGEIAKAGNYLSKVDGKSISLEASTTSLMLSLFSRKGKHLEDIKLLPAKYQFFDGFG

SEQ ID NO: 23 - protein, 880 aa, Triticum aestivum
MLRRIRISTPVIGGKKAPVRTPDADAPRHPHPPPSPPLPLLHLAGVRSPPPSPPLVRLHQYRTTSTPMSRIHLHLHQHRRLFSSTSPPSRSWSPHEAFAAATERVRAGNFSWEDAHNLFDELLRQATPVPGRSLNGFLAALARAPASEACRDGPALALALFNHVCRDESGARVAPPTIFTYGILMNCCCRAHRPDLGLAFFGRLLRTGLKADLIVANTLLKCLCRAKRTDEAVNVLLHRMSELGCVPDAFSYSIVLKSLCDNGMSQQALNLLHMMAKVGGGCSPDVVAYSTVIHGFFKEGETGKACNLFHEMMQQGVEPNVWTYSSIIDALCKARAMDKAELVLQQMVNKGVQPDNVTYNCMIHGYSTSGRWKEAVKLFREMKSRGLIPDNFTCNSLMTYLCKHGRSKEGAEFFDAMTAKGHRDVISYYILLHGYANEECFADMIDLFNSMERNGIAANCRVFNILINGYAKRGMTDEAMLIFTEMWEKGVSPNVVTYSTVIAALSRMGRLTDSMEKFNQMIAMGIQPNTAVYHSLIQGCFMHGGLVKAKELMFEMMNKGIPRPNIVFFSSVINSLCKEGRVMDAHAVFDLAIGIGERPNVITFNSLIDGYCLVGKMDKAFKILHVMESVGVESDVVTYSALLDGYFKNRRIDDALTLFREMPRKRIKPNTVTYGIMLGGLFHAGRTVAAMKMFHEMIESGATVRISTYNIILGGLCQTNCVDEAIALFQKLRAMNVKFNIEIFNTMIDAMYKVQRKEEAKELFAAISGNGLVPNEYTYAVMIRNLLKGGAVEDADNMFSSMDNSGIVPSSRLINDIIRMLLEKGEIAKAGNYLSKVDGKSISLEASTTSLMLSLFSRKGKHLEDIKLLPAKYQFFDGFG

SEQ ID NO: 24 - protein, 880 aa, Triticum aestivum; identical to SEQ ID NO: 23

SEQ ID NO: 25 - protein, 880 aa, Triticum aestivum; identical to SEQ ID NO: 23

SEQ ID NO: 26 - protein, 880 aa, Triticum aestivum; identical to SEQ ID NO: 23

SEQ ID NO: 27 - protein, 880 aa, Triticum aestivum; identical to SEQ ID NO: 22

SEQ ID NO: 28 - protein, 877 aa, Triticum aestivum
MLRRIRISTPVAPVRTPDADAPRHPHPPPLPPLPLLHLAGVRSPPPSPPLVRLHQYRTTSTPMSRIHLHLHLHQHRRLFSSTSPPSRSWSPHEAFAAATERVRAGNFSWEDAHNLFDELLRQATPVPGRSLNGFLAALARAPASEACRDGPALALALFNHVCRDESGARVAPPTIFTYGILMNCCCRAHRPDLGLAFFGRLLRTGLKADLIVANTLLKCLCRAKRTDEAVNVLLHRMSELGCVPNAFSYSIVLKSLCDNGMSQQALDLLHMMAKEGGDCSPDVVAYSTVIHGFFKEGETGKACNLFHEMMQQGVEPNVWTYSSIIDALCKARAMDKAELVLQQMVNKGVQPDNVTYNCMIHGYSTSGRWKEAVKLFREMKSRGLIPDNFTCNSLMTYLCKHGRSKEGAEFFDAMTAKGHRDVISYCILLHGYANEGCFADMIDLFNSMERNGIAANCRVFNILINGYAKRGMTEEAMLIFTEMWEKGVSPNVVTYSTVIAALSRMGRLTDSMDKFNQMIAMGIQPNTAVYHSLIQGCFMHGGLVKAKELMFEMMNKGIPRPNIVFFSSVINSLCKEGRVMDAHAVFDLAIGIGERPNVITFNSLIDGYCLVGKMDKAFKILLVMESVGVEPDVVTYSALLDGYFKNRSIDDALTFFREMPRKRIKPNTVTYGIMLGGLFRAGRTVAAMKMFHEMIESGATVRISTYNIILGGLCQTNCVDEAIALFQKLRAMNVKFNIEIFNTMIDAMYKVQRKEEAKELFAAISGNGLVPNEYTYAVMIRNLLKGGAVEDADNMFSSMDNSGIVPSSRLINDIIRMLLEKGEIAKAGNYLSKVDGKSISLEASTTSLMLSLFSRKGKHLEDIKLLPAKYQFFDGFG

SEQ ID NO: 29 - protein, 367 aa, Triticum aestivum
MAAKGLKPNIVSYSTMLNGYVKEGSFEDMTDLFNSMVRNGIVPNHHIFNIQINAYAKRGLMDEAMHMFEVMRQQGVNPNVVDYLVVMNSLCKMGRMDAALDKFNQMVNQGVSPNKAVYQCLVLGSCSHGHFVKAKELISEAVNRGLCSNSVFFYPVINDLCKEGKVEGKVKEAQDMFDFIVGIGHRPDVIMYTSLMDGYCLVGKVEEALRVLDAMKSAGLQPDAFTYGILINGYCKIGRIDEGLSLVREISLSGVKPTTIMYNIILDGLFCSGRTVPAKEKFHKMNESAIPVGVGTYNIVLSGLCKNNCTDEAIELFKKLRAVNVKINVITLTTMISAMFSQKNGSTLALHLLSSFCHLILFAQLNI

SEQ ID NO: 30 - protein, 367 aa, Triticum aestivum; identical to SEQ ID NO: 29

SEQ ID NO: 31 - protein, 367 aa, Triticum aestivum
MAAKGLKPNIVSYSTMLNGYVKEGSFEDMTDLFNSMVRNGIVPNHHIFNIQINAYAERGLMDEAMHMFEVMRQQGVNPNVVDYLVVMNSLCKMGRMDAALDKFNQMVNQGVSPNKAVYQCLVLGSCSHGHFVKAKELISEAVNRGLCSNSVFFYPVINDLCKEGKVEGKVKEAQDMFDFIVGIGHRPDVIMYTSLMDGYCLVGKVEEALRVLDAMKSAGLQPDAFTYGILINGYCKIGRIDEGLSLVREISLSGVKPTTIMYNIILDGLFCSGRTVPAKEKFHKMNESAIPVGVGTYNIVLSGLCKNNCTDEAIELFKKLRAVNVKINVITLTTMISAMFSQKNGSTLALHLLSSFCHLILFAQLNI

SEQ ID NO: 32 - protein, 217 aa, Triticum aestivum
MRWSPTLCTYSILMYCCCRAGRPDLVVAFFGRILRLGLRLDVISLNNLLKGLCQAKRSNEALDLLLHRMPELHCAPDVFSYNIVINGCLKEGEVDKACNLFHEMPQLGVQPDVVTYTSIMDALSKSGAMDKAEVLLRQMVDQGIEPNIRTYSCLIHGYSTFGQWKEALRVFKEMATLGVVPDVVTLSSLIDSLCKHRRTKEAREIFDSIYGCKGPET

SEQ ID NO: 33 - protein, 773 aa, Triticum aestivum
MSTARLSSTFTSSFKAPSRKPRAPRLAALAAATERVRAGTLSRQDAHHLFDELLSQAATVPVRTLNNFLAALARAPPSAACGDGPALAVTLFNRMSRGAGARVVSPTLCTYSILMDCCCRAGRPDLVVAFFGRLLRLGLRLEVISFSNLLKGLCQAKRTNEAVDLLLHRTPELDCVPNVFSYSIVINGCFKEGEVDKACNLFHGMIQLGVQPNVVIYTSIIDALSKCGAMDKAEVVFRQMVDKGIGPDVMTCTSLIHGYSISGRWKAAVRVFKEMISLGVVPDTVMWNSFVDSLCKHRRTKEARVIFDSMAAKGQKPDTVSYSIMLNGYVKEGCFDDMTGLFNSMLQNGVVPNHHIFNILINAYAKRGLMDEAMHMFEVMRQQGVNPDVVDYLVVMDSLCKMGRMDAALDKFNQMVNQGVSPNKAVYQCLVLGFCSHGDFVKAKELISETINRGLCSNNVFFYPVINDLCKEGKVKEAQDMFDFIVGIGQRPDVIMYNSLMDGYCLVGKVEEALRVLDAMKSAGLQPDAITYAILLNGYCKIGRIADGLSLFREMSLSGVKPTTIMYSIILDGLFRSGRTVSAKEKFNTMVESGLPVDVRTYNIVLHGLCRNNCTGEAIELFKKLCATNLKINVITFNTMISAMFKTRRIGEAKDLFATISAIGLVPSVVTYSVMTTNFIKEGLLAEADDMFLAMEKAGCAPDSRLLNHVVSVLLENGAVVKAATYLAKLDAKQLSLEASTVSLIVSLFSRKGKLREHVKLLPVKYQPPEMLG

SEQ ID NO: 34 - protein, 773 aa, Triticum aestivum
MSTARLSSTFTSSFKAPSRKPRAPRLAALAAATERVRAGTLSRQDAHHLFDELLSQAATVPVRTLNNFLAALARAPPSAACGDGPALAVTLFNRMSRGAGARVVSPTLCTYSILMDCCCRAGRPDLVVAFFGRLLRLGLRLEVISFSNLLKGLCQAKRTNEAVDLLLHRTPELDCVPNVFSYSIVINGCFKEGEVDKACNLFHGMIQLGVQPNVVIYTSIIDALSKCGAMDKAEVVFRQMVDKGIGPDVMTCTSLIHGYSISGRWKAAVRVFKEMISLGVVPDTVMWNSFVDSLCKHRRTKEARVIFDSMAAKGQKPDTVSYSIMLNGYVKEGCFDDMTGLFNSMLQNGVVPNHHIFNILINAYAKRGLMDEAMHMFEVMRQQGVNPDVVDYLVVMDSLCKMGRMDAALDKFNQMVNQGVSPNKAVYQCLVLGFCSHGDFVKAKELISETINRGLCSNNVFFYPVINDLCKEGKVKEAQDMFDFIVGIGQRPDVIMYNSLMDGYCLVGKVEEALRVLDAMKSAGLQPDAITYAILLNGYCKIGRIADGLSLFREMSLSGVKPTTIMYSIILDGLFRSGRTVSAKEKFNTMVESGLPVDVRTYNIVLHGLCRNNCTGEAIELFKKLCATNVKINVITFNTMISAMFKTRRIGEAKDLFATISAIGLVPSVVTYSVMTTNFIKEGLLAEADDMFLAMEKAGCAPNSRLLNHVVRVLLENGAVVKAATYLAKLDAKQLSLEASTVSLIVSLFSRKGKLREHVKLLPVKYQPPEMLD

SEQ ID NO: 35 - protein, 539 aa, Triticum aestivum
MSTARLSSTFTSSFKAPSRKPRAPRLAALAAATERVRAGTLSRQDAHHLFDELLSQAATVPVRTLNNFLAALARAPPSAACGDGPALAVTLFNRMSRGAGARVVSPTLCTYSILMDCCCRAGRPDLVVAFFGRLLRLGLRLEVISFSNLLKGLCQAKRTNEAVDLLLHRTPELDCVPNVFSYSIVINGCFKEGEVDKACNLFHGMIQLGVQPNVVIYTSIIDALSKCGAMDKAEVVFRQMVDKGIGPDVMTCTSLIHGYSISGRWKAAVRVFKEMISLGVVPDTVMWNSFVDSLCKHRRTKEARVIFDSMAAKGQKPDTVSYSIMLNGYVKEGCFDDMTGLFNSMLQNGVVPNHHIFNILINAYAKRGLMDEAMHMFEVMRQQGVNPDVVDYLVVMDSLCKMGRMDAALDKFNQMVNQGVSPNKAVYQCLVLGSCSHGDFVKAKELISEALNRGLCSNSVFFYPVINDLCKEGKVKEAQDMFDFIVGIGQRPDVIMYNSLMDGYCLVGKVEEALRVLDAMKSAGLQPDAIMYGILLNDH

SEQ ID NO: 36 - protein, 773 aa, Triticum aestivum; identical to SEQ ID NO: 33

SEQ ID NO: 37 - protein, 773 aa, Triticum aestivum; identical to SEQ ID NO: 34

SEQ ID NO: 38 - protein, 773 aa, Triticum aestivum; identical to SEQ ID NO: 34

SEQ ID NO: 39 - protein, 787 aa, Triticum aestivum
MPRFSSTTPMAPPRLLLRLGARHSSSTSHPSRIWDPHAAFAAAADRARSGNLTPEDAHHLFDELLRQGNPVQERPLNNFLAALARAPASASCSDCPALAVALFGRLSRGAGRRVVQPNVFTYGVLMDCCCRACRTDLALAFFGRLLKTGLEADQVVFSTLLKGLCHAKRADEALDVLLDRMPELGCTPDVVAYTTVIHGFFREGQVGKACDLFHEMAQQGVTPDVVTYSSVIDALCKAKAMDKAEYFLGQMVDSGVVPNNVTYNSLIHGYSSSGHSKEAVRVLKKMTSQGIIPDVFTCNSLMASLCNNRKSKEAAEIFHSMAMKGLKPDIVSYSTLLHGYATEGCLVDMTNLFNSMTRDGILPNCHALNILINAYAKSGMMDEAMLIFKGMRKQGVSPDAVTYATVIHAFCRNGRLDDAVIKFNQMIDTGVRPDTAVYGSLIQGFCTHGDLVKSKELVTEMMNKGIPRPDIKFFHSIMQNLCTEGRVIEARDILGLIAHIGMRPNVVTFSVLIGGYCLVRKMADASKVFDDMVSYGLEPSNITYGILINGYCKNKRIDDGLILFKTMLHKGLKPTTFNYNVILDGLFLAGRTVAAKEKFNEMVESGVSVCIGTCSIVLGGLCRNGCSSEAITLFRKLSAMNVKFDITIVNTIIGAFYRVERNQEAKDLFAAIPANGLVPNSITYTIMMTNLIKEGSVEEADNLFLSMENSGCSANSYLLNHVIRRLLQKGEIVKAGNYMSKVDAKSFSLEAKTVSLLISLFSRKGKYREHIKLLPTKYQFLEEATVE

SEQ ID NO: 40 - protein, 787 aa, Triticum aestivum
MPRFSSTTPMAPPRLLLRLGARHSSSTSHPSRIWDPHAAFAAAADRARSGNLTPEDAHHLFDELLRQGNPVQERPLNNFLAALARAPASASCSDCPALAVALFGRLSRGAGRRVVQPNVFTYGVLMDCCCRACRTDLALAFFGRLLKTGLEADQVVFSTLLKGLCHAKRADEALDVLLDRMPELGCTPDVVAYTTVIHGFFREGQVGKACDLFHEMAQQGVTPDVVTYSSVIDALCKAKAMDKAEYFLGQMVDSGVVPNNVTYNSLIHGYSSSGHSKEAVRVLKKMTSQGIIPDVFTCNSLMASLCNNRKSKEAAEIFHSMAMKGLKPDIVSYSTLLHGYATEGCLVDMTNLFNSMTRDGILPNCHALNILINAYAKSGMMDEAMLIFKGMRKQGVSPDAVTYATVIHAFCRNGRLDDAVIKFNQMIDTGVRPDTAVYGSLIQGFCTHGDLVKSKELVTEMMNKGIPRPDIKFFHSIMQNLCTEGRVIEARDILGLIAHIGMRPNVVTFSVLIGGYCLVRKMADASKVFDDMVSYGLEPSNITYGILINGYCKNKRIDDGLILFKTMLHKGLKPTTFNYNVILDGLFLAGRTVAAKEKFNEMVESGVSVCIGTCSIVLGGLCRNGCSSEAITLFRKLSAMNVKFDITIVNTIIGAFYRVERNQEAKDLFAAIPANGLVPNSVTYTIMMTNLIKEGSVEEADNLFLSMENSGCSANSYLLNHVIRRLLQKGEIVKAGNYMSKVDAKSFSLEAKTVSLLISLFSRKGKYREHIKLLPTKYQFLEEATVE

SEQ ID NO: 41 - protein, 787 aa, Triticum aestivum; identical to SEQ ID NO: 40

SEQ ID NO: 42 - protein, 787 aa, Triticum aestivum; identical to SEQ ID NO: 40

SEQ ID NO: 43 - protein, 787 aa, Triticum aestivum; identical to SEQ ID NO: 40

SEQ ID NO: 44 - protein, 787 aa, Triticum aestivum; identical to SEQ ID NO: 40

SEQ ID NO: 45 - protein, 680 aa, Triticum aestivum
MARALPSPSSTACPEALVHGWCRCRAGRPDLVVAFFGRLLRLGLCLNVISLSNLLKGLCQVKRTNEAVDLLLHRTPELDCVPNVFSYSIVINGCFKQGEVDKACNLFHGMIQLGVQPNVVIYTSIIDALSKCGVMDKAEVVFRQMVDKGIGPDVMTCTSLIHGYSISGRWKAAVRVFKEMISLGVVPDTVMWNSFVDSLCKHRRTKEARVIFDSMAAKGQKPDTVSYSIMLNGYVKEGCFDDMTGLFNSMLQNGVVPNHHIFNILINAYAKRGLMDEAMHMFEVMRQQGVNPDVVDYQIVMDSLCKMGRMDAALDKFNQMVNQGVSPDKAVYRCLVLGSCSHGDFVKAKELISEAVNRGLCSNSVFFYPVINDLCKEGKVKEAQDMFDFIVGIGQRPDVIMYNSLMDGYCLVGKVEEALRVLDAMKSAGLQPDAITYAILLNGYCKIGRIADGLSLFREMSLLGVKPTTIMYNIILDGLFRSGRTVSAKEKFRTMSESGIPVGVDTYNIVLHGLCRNNCTDEAIELFNKLRAMKLKINVITLNTMISAMFKTRRIEEAKDLFATISAIGLVPSVVTYSVMMTNFIKEGLLAEADDMFLAMEKASCAPDSILLNQVVRALLEKGAVVKAATYLAKLDAKQLSVEASTISLIVSLFSGEGKLREHVQLLPVKYQPPESSADN

SEQ ID NO: 46 - protein, 778 aa, Triticum aestivum
MPTGRLSSIFTSNATSSFRAPSPQPRAPLAALAAATERVRAGTLSRQDAHHLFDELLSQAATVPVRTLNNFLAALARAPPSAACGDGPALAIALFNRMSQGAGARVVSPTLCTYSILMDCCCRAGRPDLVVAFFGRLIRLGLRLNVIPFNNLLKGLCKAKRSNEALDLLLHRMPELDCAPDVFSYSIVINGCFKEGEVDKACNLFHGMIQLGVQPNVVIYTSIIDALSKCGAMDKAEVVFRQMVDKGIGPDVMTCTSLIHGYSISGRWKAAVRVFKEMISLGVVPDTVMWNSFVDSLCKHRRTKEARVIFDSMAAKGQKPDTVSYSIMLNGYVKEGCFDDMTGLFNSMLQNGVVPNHHIFNILINAYAKRGLMDEAMHMFEVMRQQGVNPDVVDYQIVMDSLCKMGRMDAALDKFNQMVNQGVSPDKAVYRCLVLGSCSHGDFVKAKELISEAVNRGLCSNSVFFYPVINDLCKEGKVKEAQDMFDFIVGIGQRPDVIMYNSLMDGYCLVGKVEEALRVLDAMKSAGLQPDAITYAILLNGYCKIGRIADGLSLFREMSLLGVKPTTIMYNIILDGLFRSGRTVSAKEKFRTMSESGIPVGVDTYNIVLHGLCRNNCTDEAIELFNKLRAMKLKINVITLNTMISAMFKTRRIEEAKDLFATISAIGLVPSVVTYSVMMTNFIKEGLLAEADDMFLAMEKASCAPDSILLNQVVRALLEKGAVVKAATYLAKLDAKQLSVEASTISLIVSLFSGEGKLREHVQLLPVKYQPPESSADN

SEQ ID NO: 47 - protein, 680 aa, Triticum aestivum
MARALPSPSSTACPEALVHGWCRCRAGRPDLVVAFFGRLLRLGLCLNVISLSNLLKGLCQVKRTNEAVDLLLHRTPELDCVPNVFSYSIVINGCFKQGEVDKACNLFHGMIQLGVQPNVVIYTSIIDALSKCGAMDKAEVVFRQMVDKGIGPDVMTCTSLIHGYSISGRWKAAVRVFKEMISLGVVPDTVMWNSFVDSLCKHRRTKEARVIFDSMAAKGQKPDTVSYSIMLNGYVKEGCFDDMTGLFNSMLQNGVVPNHHIFNILINAYAKRGLMDEAMHMFEVMRQQGVNPDVVDYQIVMDSLCKMGRMDAALDKFNQMVNQGVSPDKAVYRCLVLGSCSHGDFVKAKELISEAVNRGLCSNSVFFYPVINDLCKEGKVKEAQDMFDFIVGIGQRPDVIMYNSLMDGYCLVGKVEEALRVLDAMKSAGLQPDAITYAILLNGYCKIGRIADGLSLFREMSLLGVKPTTIMYNIILDGLFRSGRTVSAKEKFRTMSESGIPVGVDTYNIVLHGLCRNNCTDEAIELFNKLRAMKLKINVITLNTMISAMFKTRRIEEAKDLFATISAIGLVPSVVTYSVMMTNFIKEGLLAEADDMFLAMEKASCAPDSILLNQVVRALLEKGAVVKAATYLAKLDAKQLSVEASTISLIVSLFSGEGKLREHVQLLPVKYQPPESSADN

SEQ ID NO: 48 - protein, 905 aa, Triticum aestivum
MHQGVGCTDPSGRGQNPRPSATSHPSLSVHSLDSSAASQAARRRPGPPEFLSLLSLRRRHASSSSPLLRASVATPRRRRAVPPSAWLVPSIAGDATRARCGGARTVSLPGGQDPRQLRAELRWRRPAMPTGRLSSIFTSNATSSFRAPSPQPRAPLAALAAATERVRAGTLSRQDAHHLFDELLSQAATVPVRTLNNFLAALARAPPSAACGDGPALAIALFNRMSQGAGARVVSPTLCTYSILMDCCCRAGRPDLVVAFFGRLIRLGLRLNVIPFNNLLKGLCKAKRSNEALDLLLHRMPELDCAPDVFSYSIVINGCFKEGEVDKACNLFHGMIQLGVQPNVVIYTSIIDALSKCGAMDKAEVVFRQMVDKGIGPDVMTCTSLIHGYSISGRWKAAVRVFKEMISLGVVPDTVMWNSFVDSLCKHRRTKEARVIFDSMAAKGQKPDTVSYSIMLNGYVKEGCFDDMTGLFNSMLQNGVVPNHHIFNILINAYAKRGLMDEAMHMFEVMRQQGVNPDVVDYQIVMDSLCKMGRMDAALDKFNQMVNQGVSPDKAVYRCLVLGSCSHGDFVKAKELISEAVNRGLCSNSVFFYPVINDLCKEGKVKEAQDMFDFIVGIGQRPDVIMYNSLMDGYCLVGKVEEALRVLDAMKSAGLQPDAITYAILLNGYCKIGRIADGLSLFREMSLLGVKPTTIMYNIILDGLFRSGRTVSAKEKFRTMSESGIPVGVDTYNIVLHGLCRNNCTDEAIELFNKLRAMKLKINVITLNTMISAMFKTRRIEEAKDLFATISAIGLVPSVVTYSVMMTNFIKEGLLAEADDMFLAMEKASCAPDSILLNQVVRALLEKGAVVKAATYLAKLDAKQLSVEASTISLIVSLFSGEGKLREHVQLLPVKYQPPESSADN

SEQ ID NO: 49 - protein, 680 aa, Triticum aestivum; identical to SEQ ID NO: 45

SEQ ID NO: 50 - protein, 778 aa, Triticum aestivum; identical to SEQ ID NO: 46

SEQ ID NO: 51 - protein, 399 aa, Triticum aestivum
MHKAELFLRQMVHNGVRPDEVTYTSMIHGYSTLGRLKEVRKIFREMTSRGLIPDIVTWNSFMDSLCKHGRTKEAAKVFFSMAAKGNKPNIVSYTILLHGYANEGSFADMMSLFNSMKGGGIVANCKVFNILIGAYAKRGLIDEAMLILTEMRGQGLSPDVVTYSTLISALWRMGKLTDAMDRFSQMVVGTGVQPDTVVYHSLVQFLCTHGDLVKAKELISEMMNKGIARPNTALFSSIMDSLRNEGRVIDAHHIFDLVIDIGEKPDSSMFSTLIDGYCLVGEMDKACGVLDAMVSAGIEPNVITYSTLVSRYCKRGRIANGLILFRQMLHKKVKPTTVTYETILNGLFRAGRTADAKKIFDEMIESGIMVSISTYNIILGGLCRNNCADEAIVLFQNVQ

SEQ ID NO: 52 - protein, 292 aa, Triticum aestivum
MSSIHLRHCSTMPMPRVCLRRRLSSSFSSSFSNCTSPPSPPWSPHAAFAAATERVRAGTLSPQDAHHLFDVLFQQATRVPERSLDGFLAALGGAASSEACRDGPALALALFNRIFREEAGMRVAPPTIFTYGILMNCCCRVRRPDLGLAFFGRILRAGLKTNQIAANTVIKCLCCAKHTDEAVNMLLHRMSDLGCVPDDFSYNTVLKSLCEDGRSLQALDLLLQMVSKEGGACSPDTVAYSTVIHGFLKEGKVDKACNLFNEMMRQGVVPDVVTYVFKAVRRGEALGGRLTA

SEQ ID NO: 53 - protein, 399 aa, Triticum aestivum; identical to SEQ ID NO: 51

SEQ ID NO: 54 - protein, 833 aa, Triticum aestivum
MSSIHLRHCSTMPMPRVCLRRRLSSSFSSSFSNCTSPPSPPWSPHAAFAAATERVRAGTLSPQDAHHLFDVLFQQATRVPERSLDGFLAALGGAASSEACRDGPALALALFNRIFREEAGMRVAPPTIFTYGILMNCCCRVRRPDLGLAFFGRILRAGLKTNQIAANTVIKCLCCAKHTDEAVNMLLHRMSDLGCVPDDFSYNTVLKSLCEDGRSLQALDLLLQMVSKEGGACSPDTVAYSTVIHGFLKEGKVDKACNLFNEMMRQGVVPDVVTYSSIIDALCKAGAMHKAELFLRQMVHNGVRPDEVTYTSMIHGYSTLGRLKEVRKIFREMTSRGLIPDIVTWNSLMDSLCKHGRTKEAAKVFFSMAAKGNKPNIVSYTILLHGYANEGSFADMMSLFNSMKGGGIVANCKVFNILIGAYAKRGLIDEAMLILTEMRGQGLSPDVVTYSTLISALWRMGKLTDAMDRFSQMVVGTGVQPDTVVYHSLVQFLCTHGDLVKAKELISEMMNKGIARPNTALFSSIMDSLRNEGRVIDAHHIFDLVIDIGEKPDSSMFSTLIDGYCLVGEMDKACGVLDAMVSAGIEPNVITYSTLVSRYCKRGRIANGLILFRQMLHKKVKPTTVTYETILNGLFRAGRTADAKKIFDEMIESGIMVSISTYNIILGGLCRNNCADEAIVLFQKLRAMNVKFNITTLNTIINALYKVERREEANDLFAALPASGLVPNASTYGVMVQNLLKEGAVEEADSMFSSMEKSGCAPSSRLINDVIRTLLEKGEIVKAGKYMSKVDGKSISLEASTSSLLLSLFSGNGKYRKQLQLLPAKYQFFKGIS

SEQ ID NO: 55 - protein, 292 aa, Triticum aestivum; identical to SEQ ID NO: 52

SEQ ID NO: 56 - protein, 292 aa, Triticum aestivum; identical to SEQ ID NO: 52

SEQ ID NO: 57 - protein, 836 aa, Triticum aestivum
MSSIHLRHCSTMPMSRVCLRRRLSSSSSSSSSSFSNCTSPPSPPWSPHAAFAAATERVRAGTLSPQDAHHLFDVLFQQATRVPERSLDGFLAALGGAASSEACRDGPALALALFNRIFREEAGMRVAPPTIFTYGILMNCCCRVRRPDLGLAFFGRILRAGLKTNQIAANTVIKCLCYAKHTDEAVNMLLHRMSDLGCVPDDFSYNTVLKSLCEDGRSLQALDLLLQMVSKEGGACSPDTVAYSTVIHGFLKEGKVDKACNLFNEMMRQGVVPDVVTYSSIIDALCKAGAMHMAELFLRQMVDNDVRPDEVTYTSMIHGYSTLGRLKEVRKMFREMTSRGLIPDIVTWNSFIDSLCKHGRTKEAAKVFFSMAAKGSKPNIVSYTILLHGYANEGSFADMMSLFNSMKGGGIVANCKVFNILIGAYAKRGLIDEAMLILTEMRGQGLSPDVFTYSTLISAHWRMGKLTDAMDKFSQMVVGTGVQPDAVVYHSLVQFLCTHGDLVKAKELLSEMMNKSIARPNTALFSSIMDSLCNEGRVIDAHHIFDLVIDIGEKPDISMFSMLIDGYCLVGEMDKACGVLDAMVSAGIEPNVITYSTLVSRYCKRGRIDDGLILFRQMLHKKVKPTTVTYETILNGLFRAGRTVDAKKIFDEMIESGIMVSISTYNIILGGLCRNNCADEAIVLFQKLRAMNVKFNITTLNTIINALYKVERREEANDLFAALPASGLVPNASTYGVMVQNLLKEGAVEEADSMFSSMEKTGCAPSSRLINDVIRTLLEKGEIVKAGKYMSKVDGKSISLEASTSSLLLSLFSGNGKYRKQLQLLPAKYQFFEGIS

SEQ ID NO: 58 - protein, 399 aa, Triticum aestivum; identical to SEQ ID NO: 51

SEQ ID NO: 59 - protein, 399 aa, Triticum aestivum; identical to SEQ ID NO: 51

SEQ ID NO: 60 - protein, 292 aa, Triticum aestivum; identical to SEQ ID NO: 52

SEQ ID NO: 61 - protein, 833 aa, Triticum aestivum; identical to SEQ ID NO: 54

SEQ ID NO: 62 - protein, 824 aa, Triticum aestivum
MPRLRLRRFSTAPMFHLLHRSSSSTSTSPPSRSWSPHAAFAAATERVRAGTLSPEDAHHLFDELLRQATPVTGRSLNGFLSALARAPASAACIRDGPALAVALFNRVCREEASQQVAPLTVHTYGILMGCFCGARRPDLGLALFGRFLRTGLKTNEIIATTFLKCLCSAKRTDEAVNLLLHRMPELGCVPNAISYSIVLKSLCENSMSQRALDLLQTVAEGGGACSLNVVAYSTVIHGFFKEGKTGKACNLFHEMIHQGVDPDVVTYNLIIDALCKARAMDKAELVLQQMVDKGVQPNTVTYNCMIHGYSTSGQLKEAAKMFRKMTSHGLVPNAVTCNLLMTSLCKHGRSKEAAEIFYSMTAKGHKLDAVSYRILLHGYATEGCFADMIDLFNSMESNGFVADCHVFTILIDAYAKRGMMDEAMLIFTEMREKGVSPNVVTYSTVIAAFCRLRRLANAMDKFNEMTDMGVQPDTTVYHSLIQGFCMHGDLVKVKEFVSEMMNKGIPRPDIAFFNSVINSLCKEGRVMNAQGIFDLVIGMGERPNVITFSSLIDGYGLVGQMGEALGVLDAMVSAGIEPNVVTYSSILDGYCRNGRINDALILFREMPRKRIKPNTVTYGIMLDGLFRAGRTVAAREMFHEMTERGIPVSISIYNIILGGLCRNNCADEAITLFQKLGAMNVKFDIITLNTMINAMFKVRRREEANDLFAAVSASGLVPNASTYGIVIKNILKEGSVEEVDNMFSSMEKSGCAPSSRLINYIIRMLLEKGEIARAGNYLSKVDGKIISLEASTTSLLLSLFSREGKYRENIELLPAKYQFFNGFG

SEQ ID NO: 63 - protein, 597 aa, Triticum aestivum
MWWHIAQSSMVFFKEGKTGKACNLFHEMIHQGVDPDVVTYNLIIDALCKARAMDKAELVLQQMVDKGVQPNTVTYNCMIHGYSTSGQLKEAAKMFRKMTSHGLVPNAVTCNLLMTSLCKHGRSKEAAEIFYSMTAKGHKLDAVSYRILLHGYATEGCFADMIDLFNSMESNGFVADCHVFTILIDAYAKRGMMDEAMLIFTEMREKGVSPNVVTYSTVIAAFCRLRRLANAMDKFNEMTDMGVQPDTTVYHSLIQGFCMHGDLVKVKEFVSEMMNKGIPRPDIAFFNSVINSLCKEGRVMNAQGIFDLVIGMGERPNVITFSSLIDGYGLVGQMGEALGVLDAMVSAGIEPNVVTYSSILDGYCRNGRINDALILFREMPRKRIKPNTVTYGIMLDGLFRAGRTVAAREMFHEMTERGIPVSISIYNIILGGLCKNNCADEAIALFQKLGAMNVKFDIITLNTMINAMFKVRRREEANDLFAAVSASGLVPNASTYGIVIKNILKEGSVEEVDNMFSSMEKSGCAPSSRLINYIIRMLLEKGEIARAGNYLSKVDGKIISLEASTTSLLLSLFSREGKYRENIELLPAKYQFFNGFG

SEQ ID NO: 64 - protein, 356 aa, Triticum aestivum
MLFPDEFLQTNKKICQSLARKIFRVFGIYLPFLKFYFTVYKRAFEIGTGYSSSRPFSLSQCRARARPCLASPSAAAAAHRPPPRQCPASTTPPPPPPSHSPTSASATSPPLSPTSPMPRLRLRRFSTAPMFHLLHRSSSSTSTSPPSRSWSPHAAFAAATERVRAGTLSPEDAHHLFDELLRQATPVTGRSLNGFLSALARAPASASCIRDGPALAVALFNRVCREEASQQVAPLTVHTYGILMGCFCGARRPDLGLALFGRFLRKGLKTNEIIATTFLKCLCSAKRTDEAVNLLLHRMPELGCVPNAISYSIVLKSLCENSMSQRALDLLQTVAEGGGACSLNVVAYSTVIHGFF

SEQ ID NO: 65 - protein, 193 aa, Triticum aestivum
MIVRLSGHPLVRDSLNEAVNLLLHRMPELGCVPNAISYSIVLKSLCENSMSQRALNLLQTVAEGGGACSLNVVAYNTVIHGIFKEGKTGKACNLFHEMIHQGVDPDVVTYNLIIDALCKARAMDKAELVLQQMVDKGVQPNTVTYNCMIHGYSTSGQLKEAAKMFRKMTSHGLVPNAVTCNSLMTSLCKHGRS

SEQ ID NO: 66 - protein, 824 aa, Triticum aestivum
MPRLRLRRFSTAPMFHLLHRSSSSTSTSPPSRSWSPHAAFAAATERVRAGTLSPEDAHHLFDELLRQATPVTGRSLNGFLSALARAPASAACIRDGPALAVALFNRVCREEASQQVAPLTVHTYGILMGCFCGARRPDLGLALFGRFLRTGLKTNEIIATTFLKCLCSAKRTDEAVNLLLHRMPELGCVPNAISYSIVLKSLCENSMSQRALDLLQTVAEGGGACSLNVVAYSTVIHGFFKEGKTGKACNLFHEMIHQGVDPDVVTYNLIIDALCKARAMDKAELVLQQMVDKGVQPNTVTYNCMIHGYSTSGQLKEAAKMFRKMTSHGLVPNAVTCNLLMTSLCKHGRSKEAAEIFYSMTAKGHKLDAVSYRILLHGYATEGCFADMIDLFNSMESNGFVADCHVFTILIDAYAKRGMMDEAMLIFTEMREKGVSPNVVTYSTVIAAFCRLRRLANAMDKFNEMTDMGVQPDTTVYHSLIQGFCMHGDLVKVKEFVSEMMNKGIPRPDIAFFNSVINSLCKEGRVMNAQGIFDLVIGMGERPNVITFSSLIDGYGLVGQMGEALGVLDAMVSAGIEPNVVTYSSILDGYCRNGRINDALILFREMPRKRIKPNTVTYGIMLDGLFRAGRTVAAREMFHEMTERGIPVSISIYNIILGGLCRNNCADEAITIFQKLGAMNVKFDIITLNTMINAMFKVRRREEANDLFAAVSASGLVPNASTYGIVIKNILKEGSVEEVDNMFSSMEKSGCAPSSRLINYIIRMLLEKGEIARAGNYLSKVDGKIISLEASTTSLLLSLFSREGKYRENIELLPAKYQFFNGFG

SEQ ID NO: 67 - protein, 339 aa, Triticum aestivum
MHGDLVKVKEFVSEMMNKGIPRPDIAFFNSVINCLCKEGRVMNAQGIFDLVIGMGERPNVITFSSLIDGYGLVGQMGEALGVLDAMVSAGIEPNVVMYSSILDGYCRNGRINDALILFREMPRKRIKPNTVTYGIMLDGLFRAGRTVAAREMFHEMTERGISVSISIYNIILSGLCRNNCADEAIALFQKLGAMNVKFDIITLNTMINAMFKVRRREEANDLFAAVSASGLVPTASTYGIVIKNILKEGSVEEVDNIFSSMEKSGCAPSSRLINYIIRMLLEKGEIARAGNYLSKVDGKIISLEASTTSLLLSLFSREGKYRENIELLPAKYQFFNGFG

SEQ ID NO: 68 - protein, 356 aa, Triticum aestivum; identical to SEQ ID NO: 64

SEQ ID NO: 69 - protein, 597 aa, Triticum aestivum; identical to SEQ ID NO: 63

SEQ ID NO: 70 - protein, 597 aa, Triticum aestivum; identical to SEQ ID NO: 63

SEQ ID NO: 71 - protein, 356 aa, Triticum aestivum; identical to SEQ ID NO: 64

SEQ ID NO: 72 - protein, 824 aa, Triticum aestivum; identical to SEQ ID NO: 62

SEQ ID NO: 73 - protein, 409 aa, Triticum aestivum
MVSYGMDEAMHMFEVMRQQGVNPDVFGYQIIMDSLCKMGKMAAAMDIFNQMVNQGVSPNKAVYQCLVLGSCSHGHFVKAKELISEAVNRGLCSNSVFFYPVINDRCKEGKVKEAQDMFDFIVGIGHRPDVIMYNSLMDGYCHVGKVEEALRVLDAMKSAGLQPDVFTYGILINGYCKIGRIDEGLSLVREISLSGVKPTTIMYNIILDGLFCSGRTVPAKEKFHKMNESGIPVGVGTYNIVLSGLCKNNCTDEAIELFKKLRAVNVKINVITLTTMISAMFKTRRIEEAKDLFATISAIGLVPSVVTYSIMMTNFIKEGLLADADDMFSAMEKAGCAHNSRLLNQVVRVFLKNGEVVKAVTYLAKLDAKQLSVEASTVSLIVSLFSRKGKLREHVKLLPVKYQPPEMLD

SEQ ID NO: 74 - protein, 409 aa, Triticum aestivum; identical to SEQ ID NO: 73

SEQ ID NO: 75 - protein, 409 aa, Triticum aestivum; identical to SEQ ID NO: 73

SEQ ID NO: 76 - protein, 466 aa, Triticum aestivum
MTAKGQKPDIISYCTLLHGHAREGCFTDMIDLFNSMKSNGIAADCHVFTILIDTYAKRGMMDDAMHIFTEMQQQGVSPNVVTYSTVISALSRMGRLTDAMEKFNQMVALGVQPDRAIYQSLIQGFCMHGGLVKAKELVSQMINKGIPHPNIVFFNSVINSMCKEGRVMDAHDIFDLVIDIGDRPDDTSFNSLIDGYCLVGKMDKAFGMLNAMESVGVEPDIVTYSTLVNGYCRNGRIDDGLTLFREMMCKGVKPTTVTYGIILDGLFHSGRTVAAMKMFHQMIESGTTVTISTYSIILGGLCRNNCADEAIVLFQKLGAMIVKFSITILNTMINAMYKVQRKEEAKELFGTISASGLVPNECTYGVMIKNLLEEGSVEEADNMFSFMDRSGIVPSSRLMNDIIRMLLEKGEIAKAGYYLSKVDGKSISLEASTTSLMFSLFSRKSKYQEDMKLLPAKYQIFDGLVV

SEQ ID NO: 77 - protein, 873 aa, Triticum aestivum
MSRRIRLRRALLLRLKSGLRHSFTSPFSRLRIRLRRYSTAPMSRLRLRLPRGSSSPTTLIPRLRLLRRCSTSTSMSSPSRSWSPRDAFAAATERVRAGTLSLEDAHKLFDELLGQATPVPERSLNGFLAALARAPASGACIRDGPALAVALFNRVCREEAGAQVAALTVCTYNILMDCCCRARRPDLGLALFGCFLRKGLKTDQTGANTFLKCLCYAKRTDEAVNVLLHRMSELGCVPNAVSYNTVLKGLCDNSMSQRALDLLQMVAGKGGGCFPDVVAYSTVIHGFFKEGETGKACSLFHEMMQQGIVPSVVTYNSIIDALCKVREVDKAELVLRQMVAKGAQPDTVTYNCMINGYATSGRLKEAAKMFREMKSRGLTPNVVTCNSFLASLCKHRSSKEAAEFFDSMTAKGQKPDIISYCTLLHGHAREGCFTDMIDLFNSMKSNGIAADCHVFTILIDTYAKRGMMDDAMHIFTEMQQQGVSPNVVTYSTVISALSRMGRLTDAMEKFNQMVALGVQPDRATYQSLIQGFCMHGGLVKAKELVSQMINKGIPHPNIVFFNSVINSMCKEGRVMDAHDIFDLVIDIGDRPDDTSFNSLIDGYCLVGKMDKAFGMLNAMESVGVEPDIVTYSTLVNGYCRNGRIDDGLTLFREMMCKGVKPTTVTYGIILDGLFHSGRTVAAMKMFHQMIESGTTVTISTYSIILGGLCRNNCADEAIVLFQKLGAMNVKFSITILNTMINAMYKVQRKEEAKELFGTISASGLVPNECTYGVMIKNLLEEGSVEEADNMFSFMDRSGIVPSSRLMNDIIRMLLEKGEIAKAGYYLSKVDGKSISLEASTTSLMFSLFSRKSKYQEDMKLLPAKYQIFDGLVV

SEQ ID NO: 78 - protein, 873 aa, Triticum aestivum
MSRRIRLRRALLLRLKSGLRHSFTSPFSRLRIRLRRYSTAPMSRLRLRLPRGSSSPTTLIPRLRLLRRCSTSTSTSSPSRSWSPRDAFAAATERVRAGTLSLEDAHKLFDELLGQATPVPERSLNGFLAALARAPASGACIRDGPALAVALFNRVCREEAGAQVAALTVCTYNILMDCCCRARRPDLGLALFGCFLRKGLKTDQTGANTFLKCLCYAKRTDEAVNVLLHRMSELGCVPNAVSYNTVLKGLCDNSMSQRALNLLQMVAGKGGGCFPDVVAYSTVIHGFFKEGETGKACSLFHEMMQQGIVPSVVTYNSIIDALCKVREVDKAELVLRQMVAKGAQPDTVTYNCMINGYATSGRLKEAAKMFREMKSRGLTPNVVTCNSFLASLCKHRSSKEAAEFFDSMTAKGQKPDIISYCTLLHGHAREGCFTDMIDLFNSMKSNGIAADCHVFTILIDTYAKRGMMDDAMHIFTEMQQQGVSPNVVTYSTVISALSRMGRLTDAMEKFNQMVALGVQPDRAIYQSLIQGFCMHGGLVKAKELVSQMINKGIPHPNIVFFNSVINSMCKEGRVMDAHDIFDLVIDIGDRPDDTSFNSLIDGYCLVGKMDKAFGMLNAMESVGVEPDIVTYSTLVNGYCRNGRIDDGLTLFREMMCKGVKPTTVTYGIILDGLFHSGRTVAAMKMFHQMIESGTTVTISTYSIILGGLCRNNCADEAIVLFQKLGAMNVKFSITILNTMINAMYKVQRKEEAKELFGTISASGLVPNECTYGVMIKNLLEEGSVEEADNMFSFMDRSGIVPSSRLMNDIIRMLLEKGEIAKAGYYLSKVDGKSISLEASTTSLMFSLFSRKSKYQEDMKLLPAKYQIFDGLVV

SEQ ID NO: 79 - protein, 873 aa, Triticum aestivum; identical to SEQ ID NO: 78

SEQ ID NO: 80 - protein, 832 aa, Triticum aestivum
MSRLRLRLPRGSSSPTTLIPRLRLLRRCSTSTSTSSPSRSWSPRDAFAAATERVRAGTLSLEDAHKLFDELLGQATPVPERSLNGFLAALARAPASGACIRDGPALAVALFNRVCREEAGAQVAALTVCTYNILMDCCCRARRPDLGLALFGCFLRKGLKTDQTGANTFLKCLCYAKRTDEAVNVLLHRMSELGCVPNAVSYNTVLKGLCDNSMSQRALDLLQMVAGKGGGCFPDVVAYSTVIHGFFKEGETGKACSLFHEMMQQGIVPSVVTYNSIIDALCKVREVDKAELVLRQMVAKGAQPDTVTYNCMINGYATSGRLKEAAKMFREMKSRGLTPNVVTCNSFLASLCKHRSSKEAAEFFDSMTAKGQKPDIISYCTLLHGHAREGCFTDMIDLFNSMKSNGIAADCHVFTILIDTYAKRGMMDDAMHIFTEMQQQGVSPNVVTYSTVISALSRMGRLTDAMEKFNQMVALGVQPDRAIYQSLIQGFCMHGGLVKAKELVSQMINKGIPHPNIVFFNSVINSMCKEGRVMDAHDIFDLVIDIGDRPDDTSFNSLIDGYCLVGKMDKAFGMLNAMESVGVELDIVTYSTLVNGYCRNGRIDDGLTLFREMMCKGVKPTTVTYGIILDGLFHSGRTVAAMKMFHQMIESGTTVTISTYSIILGGLCRNNCADEAIVLFQKLGAMIVKFSITILNTMINAMYKVQRKEEAKELFGTISASGLVPNECTYGVMIKNLLEEGSVEEADNMFSFMDRSGIVPSSRLMNDIIRMLLEKGEIAKAGYYLSKVDGKSISLEASTTSLMFSLFSRKSKYQEDMKLLPAKYQIFDGLVV

SEQ ID NO: 81 - protein, 873 aa, Triticum aestivum; identical to SEQ ID NO: 78

SEQ ID NO: 82 - protein, 695 aa, Triticum aestivum
MDCCCRASRPDLGLAFFGRLLRTGLKTNEIVASTFLKCLCYANRKEEAVNVLLHRMPELGCVPDAFSYSIVLKSLCDNNTSQRGLLQMMAKEGGGCSPNVVAYSTVIHGFFKEGETGKACSLFHQMMQQGVVPNVVTYNSIIDALCKARAMDKAELVLRQMVANGAQPNEVTYTCMIHGYSTSGRLKEAAKMFREMKSRGLTPNTVTCGSLMTSLCKHGRSKEAREIFDSMTAKGHKPDIVSYRILLHGYASEGCFADMIDLCNSMESNGIAADCRVFTILIDAYAKRGMMDDAMHIFTEMQQRGVSPNVVTYSTVISALSRMGRLTDAMEKFNQMVALGVQPNIPVYWSLIQGFCMHGGLVKVKELVSQMINKGIPRPNIVFFNSVINGMCKEGRVMDAHDIFDLVIDLGGRPDVITFNSLIDGYCLARKLDKAFGMFNSMESVGVEPDIVTYSTLLDGYFKNRRINDGLALFREMPRKRIKPDIVTYGIMLDGLFRAGRTVAARTMFHEMIESGITVDIPTYNIVLRGLCRNNCTDEAIALFQKLGAMSMKFNIAILNTMINAMYKVRRREEANNLFAAISTSGLVPNQSTYAVMIINLLKDGAVEHASNMFSSMEKSGIVPSSRLINGIIRLLLENGEIAKAGIYLSKVDGNSISLEASTTSLMLSLFSRKGKYHEDMKLLPAKYQFFDGCS

SEQ ID NO: 83 - protein, 695 aa, Triticum aestivum; identical to SEQ ID NO: 82

SEQ ID NO: 84 - protein, 695 aa, Triticum aestivum
MDCCCRASRPDLGLAFFGRLLRTGLKTNEIVASTFLKCLCYANRKEEAVNVLLHRMPELGCVPDAFSYSIVLKSLCDNNTSQRGLLQMMAKEGGGCSPNVVAYSTVIHGFFKEGETGKACSLFHQMMQQGVVPNVVTYNSIIDALCKARAMDKAELVLGQMVANGAQPNEVTYTCMIHGYSTSGRLKEAAKMFREMKSRGLTPNTVTCGSLMTSLCKHGRSKEAREIFDSMTAKGHKPDIVSYRILLHGYASEGCFADMIDLCNSMESNGIAADCRVFTILIDAYAKRGMMDDAMHIFTEMQQRGVSPNVVTYSTVISALSRMGRLTDAMEKFNQMVALGVQPNIPVYWSLIQGFCMHGGLVKAKELVSQMINKGIPRPNIVFFNSVINGMCKEGRVMDAHDIFDLVIDLGGRPDVITFNSLIDGYCLARKLDKAFGMFNSMESVGVEPDIVTYSTLLDGYFKNRRINDGLALFREMPRKRIKPDIVTYGIMLDGLFCAGRTVAARTMFHEMIESGITVDIPTYNIVLRGLCRNNCTDEAIALFQKLGAMSMKFNIAILNTMINAMYKVRRREEANNLFAAISTSGLVPNQSTYAVMIINLLKDGAVEHASNMFSSMEKSGIVPSSRLINGIIRLLLENGEIAKAGIYLSKVDGNSISLEASTTSLMLSLFSRKGKYHEDMKLLPAKYQFFDGCS

SEQ ID NO: 85 - protein, 695 aa, Triticum aestivum; identical to SEQ ID NO: 82

SEQ ID NO: 86 - protein, 695 aa, Triticum aestivum
MDCCCRASRPDLGLAFFGRLLRTGLKTNEIVASTFLKCLCYANRKEEAVNVLLHRMPELGCVPDAFSYSIVLKSLCDNNTSQRGLLQMMAKEGGGCSPNVVAYSTVIHGFFKEGETGKACSLFHQMMQQGVVPNVVTYNSIIDALCKARAMDKAELVLRQMVANGAQPNEVTYTCMIHGYSTSGRLKEAAKMFREMKSRGLTPNTVTCGSLMTSLCKHGRSKEAREIFDSMTAKGHKPDIVSYRILLHGYASEGCFADMIDLCNSMESNGIAADCRVFTILIDAYAKRGMMDDAMHIFTEMQQRGVSPNVVTYSTVISALSRMGRLTDAMEKFNQMVALGVQPNIPVYWSLIQGFCMHGGLVKAKELVSQMINKGIPRPNIVFFNSVINGMCKEGRVMDAHDIFDLVIDLGGRPDVITFNSLIDGYCLARKLDKAFGMFNSMESVGVEPDIVTYSTLLDGYFKNRRINDGLALFREMPRKRIKPDIVTYGIMLDGLFRAGRTVAARTMFHEMIESGITVDIPTYNIVLRGLCRNNCTDEAIALFQKLGAMSMKFNIAILNTMINAMYKVRRREEANNLFAAISTSGLVPNQSTYAVMIINLLKDGAVEHASNMFSSMEKSGIVPSSRLINGIIRLLLENGEIAKAGIYLSKVDGNSISLEASTTSLMLSLFSRKGKYHEDMKLLPAKYQFFDGCS

SEQ ID NO: 87 - protein, 695 aa, Triticum aestivum; identical to SEQ ID NO: 82

SEQ ID NO: 88 - protein, 695 aa, Triticum aestivum
MDCCCRARRPDLGLALFGCILRTGLKIDQITANTLLKCLCYAKQTEEAVYVLLHRMSELSCVPDAFAYNIVLKSLCKGSRSQRAHDLLRTMAKDRGGCFPDVVTYTTVIHGFFKEGETGKACNLFHEMIHQGVEPDVATYNSVIDALCKARAMDKAEVVLQQMVDKGVQPDTVTYTCMINGYSTSGRLKEAAKMFREMKSRGLIPDIVTCNSFLASICKHGTSKEAAEFFDAMTAKGHKPNIVSYRILLHGYATEGCFPDMIDVFNSMESNGIAADCHVFNILIDAKRGMMDEAMLISSKMQERRVNPDVVTYSSIIAGLSRLGRLTEAMEKFNQMIALGVQPNKAVYHALIQGFCIDGDLAKAKQLVYEMMDRGIPRPNISFFSSVIKSLCQEGRVMDAHDIFDLVIDMGERPDGILFNSLIDGYCLVGKMDKALKVLDVMESVGVEPDVFTYSTLVNGYCRNGRIDDGLTLFREMPRKRIKPDTVSYRVIMVGLFRAGRTVAARKMFHEMIESGTMVDIFTYNIILGGLCRNNCADEAIALFQKLRAMNVKFDITTLNTMINAMYNVQRKEEAKDLFATISASGLVPNESTYRVMIKNLLEEGSVEKADSMFSLMDKSGIAPSSRLLNDIIRMLLEKGEITKAGNYLSKVDGKSISLEASTTSLMLSLFSREGKYREDMKLLPAKYQFFDGFC

SEQ ID NO: 89 - protein, 695 aa, Triticum aestivum
MDCCCRTRRPDLGLALFGCILRTGLKIDQITANTLLKCLCYAKQTEEAVYVLLHRMSELSCVPDAFAYNIVLKSLCKGSRSQRAHDLLRTMAKDRGGCFPDVVTYTTVIHGFFKEGETGKACNLFHEMIHQGVEPDVATYNSVIDALCKARAMDKAEVVLQQMVDKGVQPDTVTYTCMINGYSTSGRLKEAAKMFREMKSRGLIPDIVTCNSFLASICKHGTSKEAAEFFDAMTAKGHKPNIVSYRILLHGYATEGCFPDMIDVFNSMESNGIAADCHVFNILIDAKRGMMDEAMLISSKMQERRVNPDVVTYSSIIAGLSRLGRLTEAMEKFNQMIALGVQPNKAVYHALIQGFCIDGDLAKAKQLVYEMMDRGIPRPNISFFSSVIKSLCQEGRVMDAHDIFDLVIDMGERPDGILFNSLIDGYCLVGKMDKALKVLDVMESVGVEPDVFTYSTLVNGYCRNGRIDDGLTLFREMPRKRIKPDTVSYRVIMVGLFRAGRTVAARKMFHEMIESGTMVDIFTYNIILGGLCRNNCADEAIALFQKLRAMNVKFDITTLNTMINAMYNVQRKEEAKDLFATISASGLVPNESTYRVMIKNLLEEGSVEKADSMFSLMDKSGIAPSSRLLNDIIRMLLEKGEITKAGNYLSKVDGKSISLEASTTSLMLSLFSREGKYREDMKLLPAKYQFFDGFC

SEQ ID NO: 90 - protein, 695 aa, Triticum aestivum; identical to SEQ ID NO: 88

SEQ ID NO: 91 - protein, 586 aa, Triticum aestivum
MAFSRRAKQACNLFHEMIHQGVEPDVATYNSVIDALCKARAMDKAEVVLQQMVDKGVQPDTVTYTCMINGCSTSGRLKEAAKMFREMKSRGLIPDIVTCNSFLASICKHGTSKEAAEFFDAMTAKGHEPNIVSYRILLHGYATEGCFPDMIDVFNSMESNGIAADCHVFNILIDAYAKRGMMDEAMLISSKMQERRVNPDVVTYSSIIAGLSRLGRLTEAMEKFNQMIALGVQPNKAVYHALIQGFCIDGDLAKAKQLVSEMMNRGIPRPNISFFSSVIKSLCQEGRVMDAHDIFDLVIDMGERPDGILFNSLIDGYCLVGKMDKALKVLDVMESVGVEPDVFTYSTLVNGYCRNGRIDDGLTLFREMPRKRIKPDTVSYRVIMVGLFRAGRTVAARKMFHEMIESGTMVDIFTYNIILGGLCRNNCADEAIALFQKLRAMNVKFDITTLNTMINAMYNVQRKEEAKDLFATISASGLVPNESTYRVMIKNLLEEGSVEKADSMFSLMDKSGIAPSSRLLNDIIRMLLEKGEIAKAGNYLSKVDGKSISLEASTTSLMLSLFSREGKYREDMKLLPAKYQFFDGFC

SEQ ID NO: 92 - protein, 695 aa, Triticum aestivum; identical to SEQ ID NO: 89

SEQ ID NO: 93 - protein, 695 aa, Triticum aestivum; identical to SEQ ID NO: 88

SEQ ID NO: 94 - protein, 695 aa, Triticum aestivum; identical to SEQ ID NO: 89

SEQ ID NO: 95 - protein, 792 aa, Triticum aestivum
MVFPRRICRGHGARPRRDAQTGGRTPPVRPIATTDHPGPRALPAWIFLAALARATPSAACKDGPSLALALFNRVCREEAGRRVAPPTVHTYGILMNCCCLVRRPDLGLALFGRLLRTGLKTNEIVASTILKCLCCAKRTDEAVNVLLHRMSDLGCVPNVFSYNRVLKSLCEDGRSQRALDLLRVMAKGDGDGCSPCVVSYSTVIYGFFKEGKVGKACNLFHEMTQQGIVSDVVTYNSIIDALCKARAMDKAELFLRQMVDDDIRPNGVTYTAIIHGYSTLGQWKKATQMFREMTSRGLVPNTVTWNSFMASLCKHGRSKEVAELLYSMAVKGHKPNVVSYSILLHGYATEGCFADMVNLFNSMVGKGIVPDHHVFNIFINAYAKCGMMDEAMHMLTEMREQGMSPDMCTYATIIAALCRMGRLADAVDNFNQMIGKGVQPSKVVYRSLIQGFCTHGDLVKAKEFISEMTDKCICRPTIVFFSSIMHSLCNEGRVIDAHHIFDLVIDIGERPDLIAFNTLIDGYCLVGNMEKALGVLDSMVSAGIEPTVVTYSSLISGYCKSGRLDDGVILFREMEHKRVKPDTVTYNIILDGLFHAGGTIAAKKLFNEMVESGTVVSISTYRIVLGGLCRNNCTNEAIVLFQKLGAMNVKFDIAILNTMINAMYKVQRREEANDLFASLPACGLVPNASTYGVVIQNLLKEGPLEEADNMFSSMEKSGCVPSSRLINDIIRTLLEKGEIVKAANYMSKIDGKIISFEASTTSLMLSLFSEKGKYQEQLQLLPAKYHFFGGVI

SEQ ID NO: 96 - protein, 792 aa, Triticum aestivum; identical to SEQ ID NO: 95

SEQ ID NO: 97 - protein, 792 aa, Triticum aestivum; identical to SEQ ID NO: 95

SEQ ID NO: 98 - protein, 792 aa, Triticum aestivum; identical to SEQ ID NO: 95

SEQ ID NO: 99 - protein, 792 aa, Triticum aestivum; identical to SEQ ID NO: 95

SEQ ID NO: 100 - protein, 792 aa, Triticum aestivum; identical to SEQ ID NO: 95

SEQ ID NO: 101 - protein, 882 aa, Triticum aestivum
MPSRIPPPMPRRICVWLRCSSPSSSCTYPDSGLRHPSCLTSPLSGLRLRRSFTTPMSNLRLRCSFTTPMSNLRLFRRSSSSTSTPTSPSSRSWSPHAAFAAATERVRAGTLNQDDTHNLFDELLRQAIPVPGRSLNGFLAALARATSSAACIRDGPALTVALFNRVCREQAGPRVAPLTVHTYNILMDCCCRASRPDLGLAFFGRLLRTGLKTNEIVATTFLKCLCYAKRTDEAVNVLLHRMPELGCVPDAFAYSTVLKSLCDNSMSQRGLDLLHMMAKEGGGCSPNVVAYSTVIHGFFKEGETGKACNLFHEMMQQGVEPNVWTYSSIIDALCKARAMDKAELVLQQMVNKGVQPNNVTYNCMIHGYSTSGWWKEVVKLFREMKSRGLIPDIFTCNSLMTYLCKHGRSKEAAEFFDAVTAKGHRDVISYCILLHGYANEGCFADMIDLFNSMQRNGIAANCHVFNILINGYAKRGMTEEAMLIFTKMWEKGVSPDVVTYSIVIAALSRMGRLTDAMEKFNQMIAMGIQPNTAVYHSLIQGFCIDGDLVKAKQLVSEMMNRGIPRPNIVFFNSVINSLCKEGRVMDAHDVLDLVVGIGERPNVITFSSLIDGYCSVGNMDKAFKILDVMESVGVEPNVVTYSALLDGYSKNRRIDDALTLFREMPRKRIKPDTVTCGIMLDGLFRAGRTVAAMEMFHEMTESGTTVDIFIYNIILGGLCRNNCVDEAIALFQKLRAMNVKFNIEILNTMINAMYKVQRKEEAKELFATISANGLVPNESTYAVMIRNLLKDGAVEDADNMFSSMDNSGIVPSSRLINDIIRMLLEKGEIAKAGNYLSKVDGKSISLEASTTSLMLSLFSRKGKHQEDIKLLPAKYQIFDGFS

SEQ ID NO: 102 - protein, 544 aa, Triticum aestivum
MDKAELVLQQMVNKGVQPNNVTYNCMIHGYSTSGWWKEVVKLFREMKSRGLIPDIFTCSSLMTYLCKHGRSKEAAEFFDAVTAKGHRDVISYCILLHGYANEGCFADMIDLFNSMQRNGIAANCHVFNILINGYAKRGMTEEAMLIFTEMWEKGVSPDVVTYSIVIAALSRMGRLTDAMEKFNQMIAMGIQPNTAVYHSLIQGFCIDGDLVKAKQLVSEMMNRGIPRPNIVFFNSVINSLCKEGRVMDAHDVLDLVIGIGERPNVITFNSLIDGYCLVGNMDKAFKILDVMESVGVEPNVVTYSALLDGYSKNRRIDDALTLFREMPRKRIKPDTVTYGIMLDGLFRAGRTVAAMEMFHEMTESGTTVDILIYNIILGGLCRNNCVDEAIALFQKLRAMNVKFNIEILNTMINAMYKVQRKEEAKELFATISANGLVPNESTYAVMIRNLLKGGAVEDADNMFSSMDNSGIVRSSGLINDIIRMLLKKGEIAKAGNYLSKVDGKSISLEASTTSLLLSLFSRKGKHQVDIKLLPAKYQFFDGFG

SEQ ID NO: 103 - protein, 544 aa, Triticum aestivum; identical to SEQ ID NO: 102

SEQ ID NO: 104 - protein, 544 aa, Triticum aestivum; identical to SEQ ID NO: 102

SEQ ID NO: 105 - protein, 219 aa, Triticum aestivum
MPRKRIKPDTVTYGIMLDGLFRAGRIVAAMEMFHEMTESGTTVDILIYNIILGGLCRNNCVDEAIALFQKLRAMNVKFNIEILNTMINAMYKVQRKEEAKELFATISANGLVPNESTYAVMIRNLLKDGAVEDADNIFSSMDNSGIVPSSRLINDIIRMLLEKGEIAKAGNYLSKVDGKSISLEASTTSLMLSLFSRKGKHQEDIKLLPAKYQFFDGFG

SEQ ID NO: 106 - protein, 789 aa, Triticum aestivum
MVSPRRLCRGHGARPCRDAQPGGRTPPVQPIATAGHSGPRALPGRLPCRPRPCARLSCLQRWPRPRHRPLQPRMPRRSRPAGGAAHSLHLRHPDELLLPRASSGPRACLIWPPPKDRPQTNEIVASTVLKCLCCAKRTDEAVNVLIHRMSDLGCVPNEFSYKTVLKSLCEDSRSQRALDLLRVMAKGDGCSPCVVSYSTVIYGFFKEGKVGKACNLFHEMTQQGVVSDVVTYNSIIDALCKARAMDKAELFLRQMVDDDIRPNGVTYNAMIHGYSTLGQWKKATQMFREMTSRGLVPDTVTWNSCMASLCKHGRSREAAELLYSMAAKGHKPNVVSYSTLLHGYANEGCFADMVNLFNSMVGKGIVPDHHVFNIFINAYAKCGMMDEVMHMLTEMREQGMSPDVCTYATIIAALCRMGRLADAVDNFNQMIGKGVQPSKVVYRSLIQGFCTHGDLVKAKEFIFEMTDKCICRPTIVFFNSIMHSLRNEGRVIDAHHIFDLVIDIGERPDLIAFNTLIDGYCLVGNMEKALGVLDSMVSAGIEPTVVTYSSLISGYCKSGRLDDGVILFREMEHKRVKPDTVAYNIILDGLFHAGATIAAKKLFNEMIESGTAVSISTYRIVLGGFCRNNCTDEAIVLFQKLGAMNVKFDIAILNTMINAMYKVQRREEANDLFASLPACGLVPNASTYGVVIQNLLKEGSLEEADNMFSSMEKSGCAPSSRLINYIIRTLLEKGEIVNAANYMSKVDGKIISFEASTTSLLLSLFSEKGKYQEQLQLLPAKYQFFGGVI

SEQ ID NO: 107 - protein, 716 aa, Triticum aestivum
MPRRSRQAGGAAHSLHLRHPDELLLPRASSGPRACLIWPPPKDRPQTNEIVASTVLKCLCCAKRTDEAVNVLIHRMSDLGCVPNEFSYKTVLKSLCEDSRSQRALDLLRVMAKGDGCSPCVVSYSTVIYGFFKEGKVGKACNLFHEMTQQGVVSDVVTYNSIIDALCKARAMDKAELFLRQMVDDDIRPNGVTYNAMIHGYSTLGQWKKATQMFREMTSRGLVPDTVTWNSCMASLCKHGRSREAAELLYSMAAKGHKPNVVSYSTLLHGYANEGCFADMVNLFNSMVGKGIVPDHHVFNIFINAYAKCGMMDEVMHMLTEMREQGMSPDVCTYATIIAALCRMGRLADAVDNFNQMIGKGVQPSKVVYRSLIQGFCTHGDLVKAKEFIFEMTDKCICRPTIVFFNSIMHSLCNEGRVIDAHHIFDLVIDIGERPDLIAFNTLIDGYCLVGNMEKALGVLDSMVSAGIEPTVVTYSSLISGYCKSGRLDDGVILFREMEHKRVKPDTVAYNIILDGLFHAGATIAAKKLFNEMIESGTAVSISTYRIVLGGFCRNNCTDEAIVLFQKLGAMNVKFDIAILNTMINAMYKVQRREEANDLFASLPACGLVPNASTYGVVIQNLLKEGSLEEADNMFSSMEKSGCAPSSRLINYIIRTLLEKGEIVNAANYMSKVDGKIISFEASTTSLLLSLFSEKGKYQEQLQLLPAKYQFFGGVI

SEQ ID NO: 108 - protein, 789 aa, Triticum aestivum; identical to SEQ ID NO: 106

SEQ ID NO: 109 - protein, 789 aa, Triticum aestivum
MVSPRRLCRGHGARPCRDAQPGGRTPPVRPIATAGHSGPRALPGRLPCRPRPCARLSCLQRWPRPRHRPLQPRMPRRSRPAGGAAHSLHLRHPDELLLPRASSGPRACLIWPPPKDRPQTNEIVASTVLKCLCCAKRTDEAVNVLIHRMSDLGCVPNEFSYKTVLKSLCEDSRSQRALDLLRVMAKGDGCSPCVVSYSTVIYGFFKEGKVGKACNLFHEMTQQGVVSDVVTYNSIIDALCKARAMDKAELFLRQMVDDDIRPNGVTYNAMIHGYSTLGQWKKATQMFREMTSRGLVPDTVTWNSCMASLCKHGRSREAAELLYSMAAKGHKPNVVSYSTLLHGYANEGCFADMVNLFNSMVGKGIVPDHHVFNIFINAYAKCGMMDEVMHMLTEMREQGMSPDVCTYATIIAALCRMGRLADAVDNFNQMIGKGVQPSKVVYRSLIQGFCTHGDLVKAKEFIFEMTDKCICRPTIVFFNSIMHSLRNEGRVIDAHHIFDLVIDIGERPDLIAFNTLIDGYCLVGNMEKALGVLDSMVSAGIEPTVVTYSSLISGYCKSGRLDDGVILFREMEHKRVKPDTVAYNIILDGLFHAGATIAAKKLFNEMIESGTAVSISTYRIVLGGFCRNNCTDEAIVLFQKLGAMNVKFDIAILNTMINAMYKVQRREEANDLFASLPACGLVPNASTYGVVIQNLLKEGSLEEADNMFSSMEKSGCAPSSRLINYIIRTLLEKGEIVNAANYMSKVDGKIISFEASTTSLLLSLFSEKGKYQEQLQLLPAKYQFFGGVI

SEQ ID NO: 110 - protein, 390 aa, Triticum aestivum
MSPDVCTYATIIAALCRMGRLADAVDNFNQMIRKGVQPSKVVYRSLIQGFCTHGDLVKAKEFIFEMTDKCICRPTIVFFNSIMHSLCNEGRVIDAHHIFDLVIDIGERPDLIAFNTLIDGYCLVGNMEKALGVLDSMVSAGIEPTVVTYSSLISGYCKSGRLDDGVILFREMEHKRVKPDTVAYNIILDGLFHAGATIAAKKLFNEMIESGTAVSISTYRIVLGGFCRNNCTDEAIVLFQKLGAMNVKFDITILNTMINAMCKVQRREEANDLFASLPACGLVPNASTYGVVIQNLLKEGSLEEADNMFSSMEKSGCAPSSRLINYIIRTLLEKGEIVNAANYMSKVDGKIISFEASTTSLLLSLFSEKGKYQEQLQLLPAKYQFFGGVI

SEQ ID NO: 111 - protein, 716 aa, Triticum aestivum; identical to SEQ ID NO: 107

SEQ ID NO: 112 - protein, 789 aa, Triticum aestivum; identical to SEQ ID NO: 106

SEQ ID NO: 113 - protein, 758 aa, Triticum aestivum
MPTARLSSIFTSSFKAPSRERRAPLAALAAATERVRAGTLSQEDAHHLFDELLSQAATVPVRGLNNFLAALARAPPGLLYRGAGARVVSPTCCTYSILMDCCCRAGRPDLVLAFFGRLLRLGLRFEEVIPFNNLLKGLCQAKRSNEALDMLLHRMPELDCAPDVFSFNIVINGCFKEGEVDKACNLFHEMPQLGVQPDVVTYTSIMDALSKSGAMDKAEVLLRQMVDQGIEPNIITYTSLIHGYSTSGQWKAAVRIFKEMASAGVRPNSVTLNSFIDSLCKHRKTKEARDIFDSMAAKGHKPDIFSYSTMLNWYAKEGCFDDMTDLFNSMVRNGIVPDHHVFNILINAYARRGLMDKAMHMFEVMRQQGVNPNVVDYVVVMDSLCKMGKMAAAMDIFNQMVNQGVSPNKAVYQCLVLGSCSHGHFVKAKELISEAVNRGLCSNSVFFYPVINDRCKEGKVKEAQDMFDFIVGIGHRPHVIMYNSLMDGYCLVGKVEEALRVLDAMKSAGLQPDLFTYGILINGYCKIGRIDEGLSLVREISLSGVKPTTIMYNIILDGLFCSGRTVPAKEKFHKMNESGIPVGVGTYNIVLSGLCKNNCTDEAIELFKKLRAVNVKINVITLTTMISAMFKTRRIEEAKDLFAAISAIGLVPSVVTYSITMTNFIKEGLLADADDMFSAMEKAGCAHNSRLLNQVVRVFLKNGEVVKAVTYLAKLDAKQLSVEASTVSLIVSLFSRKGKLREHVKLLPVKYQPPEMLD

SEQ ID NO: 114 - protein, 768 aa, Triticum aestivum
MPTARLSSISTSSFRAPSRAPLAALAAATERVRAGTLSREDAHHLFDELLGQAAPVPERGLNNFLAALARAPPSSAYSDGPGLAIALFNRMSRCAGARVVSPTLCTYSILMDCCCRAGCRELVVAFFGRLIKLGLRLNVIPFNNLLKGLCQAKRTNEAVDLLLHRTPELDCVPNVFSYSIVINGCFKQGEVDKACNLFHQMIQLGVQPNLVTYNSIIDALSKSGAMDKAEVVLRQMVDQGIGPNVMTYTSLIHGYSTSGQWKEAVRLFKKMIGLGALPDTVMWNSFMDSLCKHRRTKDARDIFDSMAAKGQKPDIFSYSIMLNGYAKEGYFEDMTDLFNLMVRNGIVPNHHVFNILINAYAKRGLMDEAMHMFEVMRQQGVNPNVDYLVIMDSLCKMGRMDAALDKFNQMVNQGVSPNKAVYQCLVLGSCSHGHFVKAKELISEAINRGLFSNSVFFYPVINDLCKEGKVKEAQDMFNFIVGIGQRPDVIMYNSLMDGYCLVGKVEEALRVLAAMKSAGLQPTAVTYGILLNGYCKSGRIAAGLSLFMEMSLSGVKPTTIMYNIILDGLFCSGRTVSAKEEFDTMIESGIPVNVRTYNIVLSGLCRNNCTGEAIELFKKLRAMNVKINVITLNTMISAMFKTRRIEEAKDLFATISAIGLVPSVVTYSVMMTNFIKEGLLAEADDMFLAMEKAGCAPDSRLLNHVVRVLLENGAVVKAVTYLTKLDAKQLSLEASTVSFIVSLFSRKGKLREHVKLLPVKYQPPEMLG

SEQ ID NO: 115 - protein, 831 aa, Triticum aestivum
MSSIHLRHCSTMPMSRVCLRRRLSSSSSFSNCTSPPSPTWSPHAAFAAATERVRAGTLSPQDAHHLFDVLFQQAIRVPERSLDGFLAALSHATSSEACRDGPALALTLFNRVCREEAGMRVALPTIFTYGILMNCCCRVRRPDLGLAFFGCILRAGLKTNQIAANTVIKCLCCAKHTDEAVNMLLHRMSDLGCVPDAFSYNTILKSLCEDGRSLQALDLLLQMVSKEGGACSPDMVAYSTVIHGFLKEGKVDKACNLFNEMMRQGVVPDVVTYSSIIDALCKAGAMHKAELFLRQMVDNGVRPDEVTYTSMIHGYSTLGRLKEVRKMFREMTSCGLIPDIVTWNSFMDSLCKHGRTKEAAKVFFSMAAKGNKPNIVSYTILLHGYANEGSFADMMSLFNSMKGGGIVANCKVFNILIGAYAKRGLIDEAMLILTEMRGQGLSPDVVTYSTLISAHWRMGKLTDAMDNFSQMVVGTGVQPDTVFYHSLVQFLCTHGDLVKAKELISEMMNKGIARPNTALFSSIMDSLCNEGRVIDAHHIFDLVIDIGEKPDISMFSTLIDGYCLVGEMDKACGVLDAMVSAGIEPNVITYSTLVSRYCKRGRIDDGLILFRQMLHKKVKPTTVTYETILNGLFRAGRTADAKKMFHEMIESGIMVSISAYNIILGGLCRNNCADEAIVLFQKLRAMNVKFNITTLNTIINALYKVERREEANDLFAALPASGLVPNASTYGVMVQNLLKEGAVEEADSMFSSMEKSGCAPSSRLINDVIRTLLEKGEIVKAGKYMSKVDGKSISLQASTSSLLLSLFSGNGKYREQLQLLPAKYQFFNGIS

SEQ ID NO: 116 - protein, 831 aa, Triticum aestivum; identical to SEQ ID NO: 115

SEQ ID NO: 117 - protein, 831 aa, Triticum aestivum; identical to SEQ ID NO: 115

SEQ ID NO: 118 - protein, 571 aa, Triticum aestivum
MMRQGVVPDVVTYSSIIDALCKAGAMHKAELFLRQMVDNGVRPDEVTYTSMIHGYSTLGRLKEVRKMFREMTSCGLIPDVVTWNSFMDSLCKHGRTKEAAKVFFSMAAKGNKPNIVSYTILLHGYANEGSFADMMSLFNSMKGGGIVANCKVFNILIGAYAKRGLIDEAMLILTEMRGQGLSPDVVTYSTLISAHWRMGKLTDAMDKFSQMVVGMGVQPDTVFYHSLVQFLCTHGDLVKAKELISEMMNKGIARPNTALFSSIMDSLCNEGRVIDAHHIFDLVIDIGEKPDISMFSTLIDGYCLVGEMDKACGVLDAMVSAGIEPNVITYSTLVSRYCKRGRIDDGLILFRQMLHKKVKPTTVTYETILNGLFRAGRTADAKKMFHEMIESGIMVSISAYNIILGGLCRNNCADEAIVLFQKLRAMYVKFNITTLNTIINALYKVERREEANDLFAALPASGLVPNASTYGVMVQNLLKEGAVEEADSMFSSMEKSGCAPSSRLINDVIRTLLEKGEIVKAGKYMSKVDGKSISLEASTSSLLLSLFSGNGKYREQLQLLPAKYQFFNGIS

SEQ ID NO: 119 - protein, 243 aa, Triticum aestivum
MSSIHLRHCSTMPMSRVCLRRRLSSSSFSNCTSPPSPTWSPHAAFAAATERVRAGTLSPQDAHHLFDVLFQQAIRVPERSLDGFLAALSHATSSEACRDGPALALTLFNRVCREEAGMRVAPHTIFTYGILMNCCCRVRRPDLGLAFFGRILRAGLKTNQIAANTVIKCLCCAKHTDEAVNMLLHRMSDLGCVPDAFSYNTVLKSLCEDGRSLQALDLLLQMVAPPTWWLITRSSMASLRKVK

SEQ ID NO: 120 - protein, 243 aa, Triticum aestivum; identical to SEQ ID NO: 119

SEQ ID NO: 121 - protein, 571 aa, Triticum aestivum; identical to SEQ ID NO: 118

SEQ ID NO: 122 - protein, 571 aa, Triticum aestivum; identical to SEQ ID NO: 118

SEQ ID NO: 123 - protein, 243 aa, Triticum aestivum; identical to SEQ ID NO: 119

SEQ ID NO: 124 - protein, 758 aa, Triticum aestivum
MPTARLSSIFTSSFKAPSRERRAPLAALAAATERVRAGTLSQEDAHHLFDELLSQAATVPVRGLNNFLAALARAPPGLLYRGAGARVVSPTCCTYSILMDCCCRAGRPDLVLAFFGRLLRLGLRFEEVIPFNNLLKGLCQAKRSNEALDMLLHRMPELDCAPDVFSFNIVINGCFKEGEVDKACNLFHEMPQLGVQPDVVTYTSIMDALSKSGAMDKAEVLLRQMVDQGIEPNIRTYSCLIHGYSTFGQWKEALRVFKEMASLGVVPDVVTLSSLIDSLCRHRRTKQAREIFDSMAAKGLKPNIVSYSTMLNGYVKEGSFEDMTGLFNSMVRNGIVPNHHIFNILINAYAKRGLMDEAMHMFEVMRQQGVNPDVFGYQIIMDSLCKMGKMDAALDKFNQMVNQGVSPNKAVYQCLVLGSCSHGDFVKAKELISEAVNRGLCSNSVFFYPVINDRCKEGKVKDAQDMFDFIVGIGHRPDVIMYNSLMDGYCLVGKVEEALRVLDAMKSAGLQPDVFTYGILINGYCKIGRIDDGLSLVREISLSGVKPTTIMYNIILDGLFCSGRTVPAKEKFHKMNESGIPVGVGTYNIVLSGLCKNNCTDEAIELFKKLRAVNVKINVITLTTMVSAMFKTRRIEEAKDLFVTISAIGLVPSVVTYSIMMTNFIKEGLLADADDMFSAMEKAGCAHNSRLLNQVVRVFLKNGEVVKAVTYLAKFDAKQLSVEASTVSLIVSLFSRKGKLREHVKLLPVKYQPPEMLD

SEQ ID NO: 125 - protein, 758 aa, Triticum aestivum; identical to SEQ ID NO: 124

SEQ ID NO: 126 - protein, 374 aa, Triticum aestivum
MGKLTDAMDKFSQMVVGTGVQPDTVVYHSLVQFLCTHGDLVKAKELISEMMNKSIARPNTALFSSIMDSLCNEGRVIDAHHIFDLVIDIGEKPDISMFSTLIDGYCLVGEMDKACGVLDAMVSAGIEPNVITYSTLVSRYCKRGRIDDGLILFRQMLHKKVKPTTVTYETTLNGLFRAGRTADAKKIFDEMIESGIMASISTYNIILGGLCRNNCADEAVVLFQKLRAMNVKFNITTLNTIINALYKVERREEANDLFAALPVSGLVPNASTYGVMVQNLLKEGAVEEADSMFSSMEKSGCAPSSRLVNDVIRTLLEKGEIVKAGKYMSKVDGKSISLEASTSSLLLSLFSGNGKYREQLQLLPAKYQFFDGIS

SEQ ID NO: 127 - protein, 828 aa, Triticum aestivum
MSSIHLRHCSTMPMSRVCLRRRLSSFSNCTSPPSPTWSPHAAFAAATERVRAGTLSPQDAHHLFDELFRQATPVPERSLDGFLAALGRATPSEACRDGPSLALTLFNRVCREEAGMRVAPPTIFTYGILMNCCCRMGRPDLGLAYFGRILRAGLKANQIAANTVIKCLCCAKHTDEAVNMLLHRMSDLGCVPDAFSYNTVLKSLCEDGRSLQALDLLLQMASKEGGACSPDMVAYSTVIHGFLKEGKVDKACNLFDEMMRQGVVPDVVTYSSIIDALCKAGAMYKAELFLRQMVDDGVRPDEVTYTSMIHGYSTLGRWKQVRKMFREMTSRGLIPDTVTWNSFMDSLCKHGRTKEAAEVFFSMAGKGSKPNIVSYTILLHGYANEGSFADMMSLFNSMKGGGIVANCKVFNILIGAYAKRGLIDEAMLILTEMRGQGLSPDVVTYSTLISAHWRMGKLTDAMDKFSQMVVGTGVQPDTVVYHSLVQFLCTHGDLVKAKELISEMMNKSIARPNTALFSSIMDSLCNEGRVIDAHHIFDLVIDIGEKPDISMFSTLIDGYCLVGEMDKACGVLDAMVSAGIEPNVITYSTLVSRYCKRGRIDDGLILFRQMLHKKVKPTTVTYETILNGLFRAGRTADAKKIFDEMIESGIMVSISTYNIILGGLCRNNCADEAVVLFQKLRAMNVKFNITTLNTIINALYKVERREEANDLFAALPVSGLVPNASTYGVMVQNLLKEGAVEEADSMFSSMEKSGCAPSSRLVNDVIRTLLEKGEIVKAGKYMSKVDGKSISLEASTSSLLLSLFSGNGKYREQLQLLPAKYQFFDGIS

SEQ ID NO: 128 - protein, 374 aa, Triticum aestivum; identical to SEQ ID NO: 126

SEQ ID NO: 129 - protein, 828 aa, Triticum aestivum; identical to SEQ ID NO: 127

SEQ ID NO: 130 - protein, 337 aa, Triticum aestivum
MRVAPPTIFTYGILMNCCCRMGRPDLGLAYFGRILRAGLKANQIAANTVIKCLCCAKHTDEAVNMLLHRMSDLGCVPDAFSYNTVLKSLCEDGRSLQALDLLLQMASKEGGACSPDMVAYSTVIHGFLKEGKVDKACNLFDEMMRQGVVPDVVTYSSIIDALCKAGAMYKAELFLRQMVDDGVRPDEVTYTSMIHGYSTLGRWKQVRKMFREMTSRGLIPDTVTWNSFMDSLCKHGRTKEAAEVFFSMAGKGSKPNIVSYTILLHGYANEGSFADMMSLFNSMKGGGIVANCKVFNILIGAYAKRGLIDEAMLILTEMRGQGLSPDVVTYSTLISAH

SEQ ID NO: 131 - protein, 337 aa, Triticum aestivum; identical to SEQ ID NO: 130

SEQ ID NO: 132 - protein, 828 aa, Triticum aestivum; identical to SEQ ID NO: 127

SEQ ID NO: 133 - protein, 828 aa, Triticum aestivum; identical to SEQ ID NO: 127

SEQ ID NO: 134 - protein, 813 aa, Triticum aestivum
MSRLHLLRRRCSTSISTSPPSRSWSPRAAFAAATERVRAGTLSPEDAHHLFDQLLRQSTPVPERSLNGFLAALVRTPASESCRDGPSLALALFNRVCREEAGLRVAPPTIFTYNILMNCCCLARRPDLGLAFFGRLLRTGLKTNQSFANTLLKCLCCAKQTDEAVSVLLHRMSDLGCVPDDFSYNTVLKSLCEDSRSRRALDLLQMMAKEGGVCSPDVVTYNTVIHGFFKEGEIGKACNLFHEMMQQGVVPNVVTYNSIIDALCKARAMDNAELFLRMMVDNGVPPDKVTYTSMIHGYSTLGRWKEATKKFREMTSRGLIPGIITWNSFMDSLCKHGRSKEVAEIFHSMSAKGHKPDIISYTTLLHGYANEGSFPDMMSLFKSMEGNGIVANCQVFNILIDAYAKRGMMDEAMLIFTEMLGQGVNPSVITYSIVIAALCRMGRLADAMDTFSQMISVGMKPDTVVYHSLIQGFSTHGDLVKAKELIYEMMNNGIPRPNSVFFSSIVNSLCKEGRVVDAHHIFDLVKDLGERPNIIMFTTLIDGYCLVGEMDKAFRVLDAMVLAGVEPDVVTYSTLVNGYCSNGRIDDGLILFREMLHKKVKPTTVTYNIILDRLFRAGRTVAAKKMLHEMIGSGTPVSMHTYGIFLRGLCRNDCTDEAIALFQKLGALNVNFDITILNSMINAMYRVQRREEANKLFAAISTSGLVPNASTYGIMIRNLLKEGSVEEAEDMFSSMEESDCALSSRLINDIIRTLLEKGDIVKAGKYMSKVDETSISLEASTSSLLLSLFSGKGKCREQIELLPAKYQIFDGIS

SEQ ID NO: 135 - protein, 813 aa, Triticum aestivum
MSRLHLLRRRCSTSISTSPPSRSWSPRAAFAAATERVRAGTLSPEDAHHLFDQFLRQSTPVPERSLNGFLAALVRTPASESCRDGPSLALALFNRVCREEAGLRVAPPTIFTYNILMNCCCLARRPDLGLAFFGRLLRTGLKTNQSFANTLLKCLCCAKQTDEAVSVLLHRMSDLGCVPDDFSYNTVLKSLCEDSRSRRALDLLQMMAKEGGVCSPDVVTYNTVIHGFFKEGEIGKACNLFHEMMQQGVVPNVVTYNSIIDALCKARAMDNAELFLRMMVDNGVPPDKVTYTSMIHGYSTLGGWKEATKKFREMTSRGLIPGIITWNSFMDSLCKHGRSKEAAEIFHSMSAKGHKPDIISYTTLLHGYANEGSFPDMMSLFKSMEGNGIVANCQVFNILIDAYAKRGMMDEAMLIFTEMLGQGVNPSVITYSIVIAALCRMGRLADAMDTFSQMISVGMKPDTVVYHSLIQGFSTHGDLVKAKELIYEMMNNGIPRPNSVFFSSIVNSLCKEGRVVDAHHIFDLVKDLGERPNIIMFTTLIDGYCLVGEMDKAFRVLDAMVLAGVEPDVVTYSTLVNGYCSNGRIDDGLILFREMLHKKVKPTTVTYNIILDRLFRAGRTVAAKKMLHEMIGSGTPVSMHTYGIFLRGLCRNDCTDEAIALFQKLGALNVNFDITILNSMINAMYRVQRREEANKLFAAISTSGLVPNASTYGIMIRNLLKEGSVEEAEDMFSSMEESDCALSSRLINDIIRTLLEKGDIVKAGKYMSKVDETSISLEASTSSLLLSLFSGKGKCREQIELLPAKYQIFDGIS

SEQ ID NO: 136 - protein, 813 aa, Triticum aestivum; identical to SEQ ID NO: 134

SEQ ID NO: 137 - protein, 813 aa, Triticum aestivum; identical to SEQ ID NO: 135

SEQ ID NO: 138 - protein, 813 aa, Triticum aestivum; identical to SEQ ID NO: 134

SEQ ID NO: 139 - protein, 813 aa, Triticum aestivum; identical to SEQ ID NO: 135

SEQ ID NO: 140 - protein, 703 aa, Triticum aestivum
MPAARLSSFKAPSRERRPPLAALAAATERVRAGTLSRQDAHHLFDELLSQAATVPVRKLNNFLAALARAPPSAACSDGPDLAIALFNRMSRGAGARVVSPTLSTYSILMDCCCRARRPELVVAFFGRLLRLGLRLDIISSSNLLKGLCQAKRSNEALDMLLHRMPELDCAPDVFSFNIVINGCFKEGEVDKACNLFHEMPQLGVQPDVVTYTSIMDALSKSGAMDKAEVLLRQMVDQGIEPNIKTYNCLIHGYSTFGQWKAAVRVFKEMASVGVQPNAVTLNSLIDSLCKHRRTKEAREILDSMAAKGLKPNIVSYSTMLNGYVKEGCFDDMTDLFNSMVRNGIVPNHHIFNILINAYAKRGVMDEAMHMFEVMRQQGVNPDVFSYQIVMDSLCKMGRMDAALDKFNQMVNQGVSPNKAVYQCLVLGSCSHGHFVKAKELISEVVNRGLCSNSVFFYPVINGLCKEGKVKEAQDMFDFILGIGQRPDVIMYTSLMDGYCLVGEVEKALSVLDAMKSAGLQPDDVVYATLLNGYCKIGRIADGLSLFREMSLSGVKPMTIIYNIILDGLFCSGRTVCAKEKFNTMTESGIPVGVDTYNILPLERFIRRFRKCSSNLGTLRKFGRFHFCPCAHSLTRTHPFPSRTHSPASTSPCPNPARWRRSSLSPASTPPPRPLRSLPSPLVAASPSPRPRCLAKIVFLVRSG

SEQ ID NO: 141 - protein, 703 aa, Triticum aestivum; identical to SEQ ID NO: 140

SEQ ID NO: 142 - protein, 275 aa, Triticum aestivum
MPRRSRPAGGILMGCFCGAHRPDLGLALFGRFLGTGLKTNKIVATTFLKCLCYAKRTDEAVNLLLRRMPELGCVPDAISYTIVLKSLCENSMSQRALDLLQMVAEGGGACSLNVVVYSTVIHGFFKEGETGKACNLFHEMIHQGVVPNVVTYSSIIDALCKARAMDKAELVLQQMVDSGAQPNNVTYNCMIHGYSTSGQLKEAAKMFRKMTSHGLVPNAVTCSSLMTSLCKHGRSKEAAEIFYSMTAKGHKPDAVSYRILLHGYANEGCFADMID

SEQ ID NO: 143 - protein, 275 aa, Triticum aestivum; identical to SEQ ID NO: 142

SEQ ID NO: 144 - protein, 807 aa, Triticum aestivum
MPAARLSSISTSSFKAPSREGRAPLAALAAATERVLAGTLSRQDAHHLFDELLSQAAAVPERGLNNSLAALARTPPSAACSDGPGLAIALFNRMSRGAGALVASSTLCTYSILMDCCCRAGRPDLVVAFFGRLLRLGLRLNVISFNNLLKGLCQAKRSNEALDLLLHRMPELDCAPDVFSFNIVINGCFREGEVDKACNLFHEMPQLGVQPDVVIYNSIIDTLSKSGAMDKAEVVLRQMVDKGIGPDVMTYNSLIHGYSTLGQWKAAVRVFKEMVSVGVLPNAVTLNSFMDSLCKHRRTKEARDIFDSMAAKGHKPNIASYSTMLNGYAKQGCFDDMTGLFNSMVQNGIVPNNHVFNILIRAYSTRGLMDKAMHMFEVMKQQGVNPNVVDYLVIMDSLCKMGRMDAALDKFNQMVNQGVSPDKVVYRCLVLGSCSHGHFVKAKELISKAVNRGLCSNSEFFYPVINDLCKEGKVKEAQDMFDFIVGIGQRPDVIMYNSLMDGYCLVGKVEEAVRVLDAMKSAGLQPTAVTYAILLNGYCKIGRIAAGLSLFMEMSLSGVKPTTIMYNIIPDGLFCSGRTVSAKEKFNTMIESGIPVGVDTYNIVLHGLCRNNCTDEAIDLFKKLCARNVKIDVITFNTVISAMFKTRRIEEAKDLFATIPAIGLVPSVVTYSLMMTNFIKEGSLAEADDMFLAMEKDGCAPDSRLLNQVVRVLLEKGAVVQAATYLAKLDAKQMSLEVSTISLIVYLFSRKGKLREHVKLLPMSTSLRRCPTDVTWWYSLIADRMSLPPPAVFENADNSSILLLPDV

SEQ ID NO: 145 - protein, 406 aa, Triticum aestivum
MDCCCRARRPDLGLALFGRFLRTGLKTNEIIANTFLKCLCYAKRTNEAINLLLHRMPELGCVPDAFSYNIVLKSLCENSMSQRALDLLQMVAEGGGACSLNVVAYSTVIHGFFKEGETGKACNLFHEMIHQGVVPNVVTYSSIIDALCKAREMDKAELVLQQMVDSGAQPNNVTYNCMIHGYSTSGQLKEAAKMFRKMTSHGLVPNAVTCSSLMTSLCKHGRSKEAAEIFYSMTAKGHKPDAVSYRILLHGYATEGCFADMIDLFNSMESNGFVADCHVFTILIDAYAKRGMMDEAMLIFTEMQEKGVSPNVVTYSTVIAALCRLGRLADAMDKFNEMIDMGVQPGTTVYHSLIQGFCMHVDLVKAKELVSDMISKGIPRPNIVFLQFSYKLFVQRRTGYGCTRYL

SEQ ID NO: 146 - protein, 298 aa, Triticum aestivum
MDAQDIFELVISIDGKPDVITFNSLIDGYCLVGKMDKAFGVLDAMVSAGIEPNVVTYNTLVNGYSRNGRIDDGLTLFRQMPRKRIKPDSATYGIILDGLFRAGRTVAARKMFHEMIESGITVSISTYNIILAGLSRNNCAEEAIDLYQKLVAMNVKFNISIINTMINAMYKVKRKEEAKDLFAAISASGLVPNASTYGVMIINILKDGAVEDANNMFSAMDRNGIAPCSRLINSIIRILLEKGEITMAGLYLSKLDGKNMLLEASTTSLMLSLFSRKGKYKEDVKFLPAKYQFFDGFG

SEQ ID NO: 147 - protein, 824 aa, Triticum aestivum
MSRLRLRRSSTTPMFHLLRRSSSSTSISPPSRSWSPEGAFAAATARVSAGTLSPEEAHHLFDELLRQGTPVPSRSLNGFLATLARAPASAAYSRDGPALALALFNRVCTEKAGSRVAHLTVHTYGILMDCCCRARRPDLGLALFGRFLRTGLKTNEIIANTFLKCLCYAKRTNEAINLLLHRMPELGCVPDAFSYNIVLKSLCENSMSQRALDLLQMVAEGGGACSLNVVAYSTVIHGFFKEGETGKACNLFHEMIHQGVVPNVVTYSSIIDALCKARAMDKAELVLQQMVDSGAQPNNVTYNCMIHGYSTSGQLKEAAKMFRKMTSHGLVPNAVTCSSLMTSLCKHGRSKEAAEIFYSMTAKGHKPDAVSYRILLHGYATEGCFADMIDLFNSMESNGFVADCHVFTILIDAYAKRGMMDEAMLIFTEMQEKGVSPNVVTYSTVIAALCRLGRLADAMDKFNEMIDMGVQPGTTVYHSLIQGFCMHVDLVKAKELVSDMISKGIPRPNIVFFNSVINYLCKEGRVMDAQDIFELVISIDGKPDVITFNSLIDGYCLVGKMDKAFGVLDAMVSAGIEPNVVTYNTLVNGYSRNGRIDDGLTLFRQMPRKRIKPDSATYGIILDGLFRAGRTVAARKMFHEMIESGITVSISTYNIILAGLSRNNCAEEAIDLYQKLVAMNVKFNISIINTMINAMYKVKRKEEAKDLFAAISASGLVPNASTYGVMIINILKDGAVEDANNMFSAMDRNGIAPCSRLINSIIRILLEKGEITMAGLYLSKLDGKNMLLEASTTSLMLSLFSRKGKYKEDVKFLPAKYQFFDGFG

SEQ ID NO: 148 - protein, 298 aa, Triticum aestivum; identical to SEQ ID NO: 146

SEQ ID NO: 149 - protein, 406 aa, Triticum aestivum; identical to SEQ ID NO: 145

SEQ ID NO: 150 - protein, 824 aa, Triticum aestivum; identical to SEQ ID NO: 147

SEQ ID NO: 151 - protein, 298 aa, Triticum aestivum; identical to SEQ ID NO: 146

SEQ ID NO: 152 - protein, 298 aa, Triticum aestivum; identical to SEQ ID NO: 146

SEQ ID NO: 153 - protein, 406 aa, Triticum aestivum; identical to SEQ ID NO: 145

SEQ ID NO: 154 - protein, 406 aa, Triticum aestivum; identical to SEQ ID NO: 145

SEQ ID NO: 155 - protein, 535 aa, Triticum aestivum
MMVLDLNVTYSSLIHGYSSSGHWKEAVRVFKEMTSRRVTADVHTYNMFMTFLCKHGRSKEAAGIFDTMAIKGLKPDNVSYAILLHGYAAEGCLVDMINLFNSMERDCILPDCRIFNILINAYAKSGKLDKAMLIFNEMQKQGVSPNAVTYSTVIHAFCKKGRLDDAVIKFNQMIDTGVRPDASVYRPLIQGFCTHGDLVKAKEYVTEMMKKGMPPPDIMFFSSIMQNLCTEGRVTEARDILDLIVHIGMRPNVIIFNLLIGGYCLVRKMADALKVFDDMVSYGLEPCNFTYGILINGYCKNRRIDDGLILFKEMLHKGLKPTTFNYNVILDGLFLAGQTVAAKEKFDEMVESGVSVCIDTYSIILGGLCRNSCSSEAITLFRKLSAMNVKFDITIVNIIIGALYRVERNQEAKDLFAAMPANGLVPNAVTYTVMMTNLIKEGSVEEADNLFLSMEKSGCTANSCLLNHIIRRLLEKGEIVKAGNYMSKVDAKSYSLEAKTVSLLISLFSRKGKYREHIKLLPTKYQFLEEAATVE

SEQ ID NO: 156 - protein, 788 aa, Triticum aestivum
MPRFSSTTPMSPPRLRLRLCARHSSSTSHPSRIWDPHAAFAAAAQRASSGTLTTEDAHHLFDELLRRGNPVQERPLNKFLAALARAPASASCCDGPALAVALFGRLSRDVGRRVAQPNVFTYGVLMDCCCRACRTDLVLAFFGRLLKTGLEANQVVFNTLLKGLCHTKRADEALDVLLHRMPELGCTPNVVAYNTVIHGFFKEGHVSKACNLFHEMAQQGVKPNVVTYNSVIDALCKARAMDKAEVVLRQMIDDGVGPDNVTYSSLIHGYSSSGHWKEAVRVFKEMTSRRVTADVHTYNMFMTFLCKHGRSKEAAGIFDTMAIKGLKPDNVSYAILLHGYAAEGCLVDMINLFNSMERDCILPDCRIFNILINAYAKSGKLDKAMLIFNEMQKQGVSPNAVTYSTVIHAFCKKGRLDDAVIKFNQMIDTGVRPDASVYRPLIQGFCTHGDLVKAKEYVTEMMKKGMPPPDIMFFSSIMQNLCTEGRVTEARDILDLIVHIGMRPNVIIFNLLIGGYCLVRKMADALKVFDDMVSYGLEPCNFTYGILINGYCKNRRIDDGLILFKEMLHKGLKPTTFNYNVILDGLFLAGQTVAAKEKFDEMVESGVSVCIDTYSIILGGLCRNSCSSEAITLFRKLSAMNVKFDITIVNIIIGALYRVERNQEAKDLFAAMPANGLVPNAVTYTVMMTNLIKEGSVEEADNLFLSMEKSGCTANSCLLNHIIRRLLEKGEIVKAGNYMSKVDAKSYSLEAKTVSLLISLFSRKGKYREHIKLLPTKYQFLEEAATVE

SEQ ID NO: 157 - protein, 258 aa, Triticum aestivum
MPRFSSTTPMSPPRLRLRLCARHSSCTSHPSRIWDPHAAFAAAAQRASSGTLTTEDAHHLFDELLRRGNPVQERPLNKFLAALARAPASASCCDGPALAVALFGRLSQDVRRRVAQPNVFTYGVLMDCCCRACRTDLALAFFGRLLKTGLEANQVVFNTLLKGLCHTKRADEALDVLLHRMPELGCTPDVVAYNTVIHGFFKEGHVSKACNLFHEMAQQGVKPNVVTYNSVIDALCKARAMDKAEVVLRQMIDDGVGP

SEQ ID NO: 158 - protein, 788 aa, Triticum aestivum; identical to SEQ ID NO: 156

SEQ ID NO: 159 - protein, 542 aa, Triticum aestivum
MPTGRLSSIFTSNATSSFRAPSPQPRAPLAALAAATERVRAGTLSRQDAHHLFDELLSQAATVPVRTLNNFLAALARAPPSAACGDGPALAIALFNRMSQGAGARVVSPTLCTYSILMDCCCRAGRPDLVVAFFGRLIRLGLRLNVIPFNNLLKGLCKAKRSNEALDLLLHRMPELDCAPDVFSYSIVINGCFKEGEVDKACNLFHGMIQLGVQPNVVIYTSIIDALSKCGAMDKAEVVFRQMVDKGIGPDVMTCTSLIHGYSISGRWKAAVRVFKEMISLGVVPDTVMWNSFVDSLCKHRRTKEARVIFDSMAAKGQKPDTVSYSIMLNGYVKEGCFDDMTGLFNSMLQNGVVPNHHIFNILINAYAKRGLMDEAMHMFEVMRQQGVNPDVVDYLVVMDSLCKMGRMDAALDKFNQMVNQGVSPNKAVYQCLVLGSCSHGDFVKAKELISEALNRGLCSNSVFFYPVINDLCKEGKVKEAQDMFDFIVGIGQRPDVIMYNSLMDGYCLVGKVEEALRVLDAMKSAGLQPDAIMYGILLNDH

SEQ ID NO: 160 - protein, 776 aa, Triticum aestivum
MPTGRLSSIFTSNATSSFRAPSPQPRAPLAALAAATERVRAGTLSRQDAHHLFDELLSQAATVPVRTLNNFLAALARAPPSAACGDGPALAIALFNRMSQGAGARVVSPTLCTYSILMDCCCRAGRPDLVVAFFGRLIRLGLRLNVIPFNNLLKGLCKAKRSNEALDLLLHRMPELDCAPDVFSYSIVINGCFKEGEVDKACNLFHGMIQLGVQPNVVIYTSIIDALSKCGAMDKAEVVFRQMVDKGIGPDVMTCTSLIHGYSISGRWKAAVRVFKEMISLGVVPDTVMWNSFVDSLCKHRRTKEARVIFDSMAAKGQKPDTVSYSIMLNGYVKEGCFDDMTGLFNSMLQNGVVPNHHIFNILINAYAKRGLMDEAMHMFEVMRQQGVNPDVVDYLVVMDSLCKMGRMDAALDKFNQMVNQGVSPNKAVYQCLVLGFCSHGDFVKAKELISETINRGLCSNNVFFYPVINDLCKEGKVKEAQDMFDFIVGIGQRPDVIMYNSLMDGYCLVGKVEEALRVLDAMKSAGLQPDAITYAILLNGYCKIGRIADGLSLFREMSLSGVKPTTIMYSIILDGLFRSGRTVSAKEKFNTMVESGLPVDVRTYNIVLHGLCRNNCTGEAIELFKKLCATNVKINVITFNTMISAMFKTRRIGEAKDLFATISAIGLVPSVVTYSVMTTNFIKEGLLAEADDMFLAMEKAGCAPNSRLLNHVVRVLLENGAVVKAATYLAKLDAKQLSLEASTVSLIVSLFSRKGKLREHVKLLPVKYQPPEMLD

SEQ ID NO: 161 - protein, 669 aa, Triticum aestivum
  SITE 28: note = misc_feature - Xaa can be any naturally occurring amino acid
MHQGVGCTDPSGRGQNPRPSATSHPSLXVHSLDSSAASQAARRRPGPPEFLSLLSLRRRHASSSSPLLRASVATPRRRRAVPPSAWLVPSIAGDATRARCGGARTVSLPGGQDPRQLRAELRWRRPAMPTGRLSSIFTSNATSSFRAPSPQPRAPLAALAAATERVRAGTLSRQDAHHLFDELLSQAATVPVRTLNNFLAALARAPPSAACGDGPALAIALFNRMSQGAGARVVSPTLCTYSILMDCCCRAGRPDLVVAFFGRLIRLGLRLNVIPFNNLLKGLCKAKRSNEALDLLLHRMPELDCAPDVFSYSIVINGCFKEGEVDKACNLFHGMIQLGVQPNVVIYTSIIDALSKCGAMDKAEVVFRQMVDKGIGPDVMTCTSLIHGYSISGRWKAAVRVFKEMISLGVVPDTVMWNSFVDSLCKHRRTKEARVIFDSMAAKGQKPDTVSYSIMLNGYVKEGCFDDMTGLFNSMLQNGVVPNHHIFNILINAYAKRGLMDEAMHMFEVMRQQGVNPDVVDYLVVMDSLCKMGRMDAALDKFNQMVNQGVSPNKAVYQCLVLGSCSHGDFVKAKELISEALNRGLCSNSVFFYPVINDLCKEGKVKEAQDMFDFIVGIGQRPDVIMYNSLMDGYCLVGKVEEALRVLDAMKSAGLQPDAIMYGILLNDH

SEQ ID NO: 162 - protein, 739 aa, Triticum aestivum
MPSEACRDGPFLALTLFNRVCREEAGMRVAPPTIFTYGILMNCCCRMGRPDLGLAYFGRILRAGLKANQIAANTVIKCLCCAKHSDEAVNMLLHRMSDLGCVPDAFSYNTVLKSLCEDGRSLQALDLLLQMASKEGGACSPDMVAYSTVIHGFLKEGKVDKACNLFDEMMRQGVVPDVVTYSSIIDALCKAGAMYKAELFLWQMVDDGVRPDEVTYTSMIHGYSTLGRWKQVRKMFREMTSRGLIPDTVTWNSFMDSLCKHGRTKEAAEVFFSMAGKGSKPNIVSYTILLHGYANEGSFADMMSLFNSMKGGGIVANCKVFNILIGAYAKRGLIDEAMLILTEMRGQGLSPDVVTYSTLISAHWRMGKLTDAMDKFSQMVVGTGVQPDTVVYHSLVQFLCTHGDLVKAKELISEMMNKSIARPNTALFSSIMDSLCNEGRVIDAHHIFDLVIDIGEKPDISMFSTLIDGYCLVGEMDKACGVLDAMVSAGIEPNVITYSTLVSRYCKRGRIDDGLILFRQMLHKKVKPTTVTYETTLNGLFRAGRTADAKKIFDEMIESGIMVSISTYNIILGGLCRNNCADEAIILFQKLRAMNVKFNITTLNTIIDALYKVERREEANDLFAALPASGLVPNASTYGVMVQNLLKEGAVEEADSMFSSMEKSGCAPSSRLVNDVIRTLLEKGEIVKAGKYMSKVDEKSISLEASTSSLLLSLFSGNGKYREQLQLLPAKYQFFDGIS

SEQ ID NO: 163 - protein, 825 aa, Triticum aestivum
MSRLRLRHCSCFTTPMSRIRLRRRLSSSTSRPTPSRSPRAAFAAATERVRAGTLSPQDAHHLFDELFQQATPVPERPLNGFLAALTRATPSEACRDGPALALSLFNRVCREEAGMRVAPPTIFTYGVLMNCCCRMRRPELGLAFFGRLLRTGLKADKIVANTVLKCLCCAKRADDAVKVLLHRMTELGCVPDAFSYAIVLKSLCDDNRSQQALYLLRMMAKEEGVCSPDVVTYNTVIHGFFKEGKIGKACNLFHEMTKQGFVPNVVTYNSVINALCKARAMDNAELFLRQMVDNGVQPNKVTYTSMIHGYSTLGQWKEATKLFREMTSSGLIPDIVTWNSFIDSLCKHGRSKEAAEIFHSMSAKGHKPDIISYTTLLHGYANEGSFPDMMSLFKSMEGDGIVANCQFFNILIDAYAKRGMMDEAMLIFTEMPGQGVNPNVVTYSTVVASLCRMGRLADAMNKFSEMIGTGVQPNTVVYHSLVQGLCTHGDLVKAKELISEMMNKGIPRPNIAFFSSIVHSLCKEGRVMDAHHIFDLVKDIGERSDIIMFNTLIDGYCLVGEMGKAVSVLDVMISAGIEPDIFTYNTLVNGYFKSGRIDDGLNLFREMSHKKIKPTTVTYNIILDGLFRAGRTVAAKKMLHELIGCGTTVSLSTYNIILKGLCRNNCTDEAIVMFQKLHTINVKFNITTLNTMINSMYTVQRREEAKNLFAAISDSGLVPNASTYGIMIRNLLKEGSVEEADSMFLSMERSGCAPCSRLLNDTIRTLLEKGEIVKAGNYMSKVDGKSISLEASTCSLLLSLFSGKGKYREQIQLLPVKYQFFGGVS

SEQ ID NO: 164 - protein, 825 aa, Triticum aestivum
MSRPRLRHCSCFTTPMSRIRFRRRLSSSTSRPTPSWSPRAAFAAATERVRDGTLSPQDAHHLFDELFQQATPVPDRPLNGFLAALTRATPSEACRDGPALALSLFNRVYREEAGMRVAPPTIFTYGVLMNCCCRMRRPELGLAFFGRLLRTGLKEDKIVANTVLKCLCCAKRADDAVKVLLHTMTELGCVPDAFSYAIVLKSLCDDNRSQQALYLLRMMAKEEGVCSPDVVTYNTVIHGFFKEGKIGKACNLFHEMTKQGFVPNVVTYNSVINALCKARAMDNAELFLRQMVDNGVQPNKVTYTSMIHGYSTLGQWKEATKLFREMTSSGLIPDIVTWNSFIDSLCKHGRSKEAAEIFHSMSAKGHKPDIISYTTLLHGYANEGSFPDMMSLFKSMEGDGTVANCQFFNILIDAYAKRGMMDEAMLIFTEMPGQGVNPNVVTYSTVIASLCRMGRLADAMNKFSEMIGTGVQPNTVVYHSLVQGLCTHGDLVKAKELISEMMNKGIPRPNIAFFSSIVHSLCKEGRVMDAHHIFDLVKDIGERSDIIMFNTLIDGYCLVGEMGKAVSVLDVMISAGIEPDIFTYNTLVNGYFKSGRIDDGLNLFREMSHKKIKPTTVTYNIILDGLFRAGRTVAAKKMLHELIGCGTTVSLSTYNIILKGLCRNNCTDEAIVMFQKLHTINVKFNITTLNTMINSMYTVQRREEAKDLFAAISDSGLVPNASTYGIMIRNLLKEGSVEEADSMFLSMERSGCAPCSRLLNDTIRTLLEKGEIVKAGNYMSKVDGKSISLEASTCSLLLSLFSGKGKYREQIQLLPVKYQFFGGVS

SEQ ID NO: 165 - protein, 825 aa, Triticum aestivum; identical to SEQ ID NO: 164

SEQ ID NO: 166 - protein, 825 aa, Triticum aestivum; identical to SEQ ID NO: 164

SEQ ID NO: 167 - protein, 825 aa, Triticum aestivum; identical to SEQ ID NO: 164

SEQ ID NO: 168 - protein, 825 aa, Triticum aestivum; identical to SEQ ID NO: 164

SEQ ID NO: 169 - protein, 825 aa, Triticum aestivum; identical to SEQ ID NO: 164

SEQ ID NO: 170 - protein, 697 aa, Triticum aestivum
MNCCRRTRRPELGLAFFGRVLRMGLRTNVVVATTVLQCLCGAKRTDEAVDILLHRMSELGCVPDAFSYSIVLKSLCDDGRSQRALDLLHMWEKERGLCSPNVVMYNTVIHGFFKEGEVSKACILFHEMEQKGVVPNVVTYSLTIDALCKARAMDKAQLFLRQMIDKGVRPNNVTYNVMIHGYCTLGQWKEARKMFREMTRQGLIPDIVTWTSFMASLCKHGRTKEAAEFFDSMTAKGHKPDLVMYHVLLHGYATKGCFADMINLFNSMATKGIVPDRQVFNILIDAHAKHGMMDEAMHIFTGMQGQGVCPDVWTYSTLISALCRMGRLADAMDNFSQMIGKGVQPNTVVYHSLIQGFSTHGDLRKAKELVYEMTNKGIPCPNIAFFSSVMDSICKEGRVMDAHDIFHLVTDIGLKPNIITFNTLIDGHCLAGEMEKAFGVLDSMVSAGIEADVFTYNTLAYGYCRCGRIDDGLILFREMLQNKPKPTTITYNIILDGLFRAGRTFAAKKMFVEMIETGITVSISTYSIILGGLCRNNCSDEAITLFQKLGTMNVKFDIKILNTMINAMFKVRRREETNGLFAAISASGMVPNASTYSVMIGNLLKEGSVEEAENMFSLMEKSGCAPDSRLINNIIRILLENGDIVKAGNYMSKVDGKSISLEASTTSLLMCLFSSKGKYREQISLLPVNYQFFNGVG

SEQ ID NO: 171 - protein, 824 aa, Triticum aestivum
MSRLRHSTSTAPMPHLRLLRCRSSSISTLPPSRSWSPVTAFAAATERVSAGTLSPEDAHRLFDELLRQATPVPARSLNGFLTALSRAPGTGACGDGPALALALFNRTRREEAGSRVVPSTIFTYGILMNCCRRTRRPELGLAFFGRVLRMGLRTNVVVATTVLQCLCGAKRTDEAVDILLHRMSELGCVPDAFSYSIVLKSLCDDGRSQRALDLLHMWEKERGLCSPNVVMYNTVIHDFFKEGEVSKACSLFHEMEQKGVVPNVVTYSLTIDALCKARAMDKAQLFLRQMIDKGVRPNNVTYNVMIHGYCTLGQWKEARKMFREMTRQGLIPDIVTWTSFMASLCKHGRTKEAAEFFDSMTAKGHKPDLVMYHVLLHGYATKGCFADMINLFNSMATKGIVPDRQVFNILIDAHAKHGMMDEAMHIFTGMQGQGVCPDVWTYSTLISALCRMGRLADAMDNFSQMIGKGVQPNTVVYHSLIQGFSTHGDLRKAKELVYEMTNKGIPCPNIAFFSSVMDGICKEGRVMDAHDIFHLVTDIGLKPNIITFNTLIDGHCLVGEMEKAFGVLDSMVSAGIEADVFTYNTLAYGYCRCGRIDDGLILFREMLQNKPKPTTITYNIILDGLFRAGRTFAAKKMFVEMIETGITVSISTYSIILGGLCRNNCSDEAITLFQKLGAMNVKFDIKILNTMINAMFKVRRREEANGLFAAISASGMVPNTSTYSVMIGNLLKEGSVEEAENMFSLMEKSGCAPDSRLINNIIRILLENGDIVKAGNYMSKVDGKSISLEASTTSLLMCLFSSKGKYREQISLLPVNYQFFNGVG

SEQ ID NO: 172 - protein, 824 aa, Triticum aestivum; identical to SEQ ID NO: 171

SEQ ID NO: 173 - protein, 824 aa, Triticum aestivum; identical to SEQ ID NO: 171

SEQ ID NO: 174 - protein, 836 aa, Triticum aestivum
MSRLRHSTSTAPMSRLRHSTSTAPMPHLRLLRCRSSSISTLPPSRSWSPVTAFAAATERVSAGTLSPEDAHRLFDELLRQATPVPARSLNGFLTALSRAPGTGACGDGPALALALFNRTRREEAGSRVVPSTIFTYGILMNCCRRTRRPELGLAFFGRVLRMGLRTNVVVATTVLQCLCGAKRTDEAVDILLHRMSELGCVPDAFSYSIVLKSLCDDGRSQRALDLLHMWEKERGLCSPNVVMYNTVIHDFFKEGEVSKACSLFHEMEQKGVVPNVVTYSLTIDALCKARAMDKAQLFLRQMIDKGVRPNNVTYNVMIHGYCTLGQWKEARKMFREMTRQGLIPDIVTWTSFMASLCKHGRTKEAAEFFDSMTAKGHKPDLVMYHVLLHGYATKGCFADMINLFNSMATKGIVPDRQVFNILIDAHAKHGMMDEAMHIFTGMQGQGVCPDVWTYSTLISALCRMGRLADAMDNFSQMIGKGVQPNTVVYHSLIQGFSTHGDLRKAKELVYEMTNKGIPCPNIAFFSSVMDGICKEGRVMDAHDIFHLVTDIGLKPNIITFNTLIDGHCLVGEMEKAFGVLDSMVSAGIEADVFTYNTLAYGYCRCGRIDDGLILFREMLQNKPKPTTITYNIILDGLFRAGRTFAAKKMFVEMIETGITVSISTYSIILGGLCRNNCSDEAITLFQKLGAMNVKFDIKILNTMINAMFKVRRREEANGLFAAISASGMVPNTSTYSVMIGNLLKEGSVEEAENMFSLMEKSGCAPDSRLINNIIRILLENGDIVKAGNYMSKVDGKSISLEASTTSLLMCLFSSKGKYREQISLLPVNYQFFNGVG

SEQ ID NO: 175 - protein, 824 aa, Triticum aestivum; identical to SEQ ID NO: 171

SEQ ID NO: 176 - protein, 836 aa, Triticum aestivum
MSRLRHSTSTAPMSRLRHSTSTAPMPHLRLLRCRSSSISTLPPSRSWSPVTAFAAATERVSAGTLSPEDAHRLFDELLRQATPVPARSLNGFLTALSRAPGTGACGDGPALALALFNRTRREEAGSRVVPSTIFTYGILMNCCRRTRRPELGLAFFGRVLRMGLRTNVVVATTVLQCLCGAKRTDEAVDILLHRMSELGCVPDAFSYSIVLKSLCDDGRSQRALDLLHMWEKERGLCSPNVVMYNTVIHDFFKEGEVSKACSLFHEMEQKGVVPNVVTYSLTIDALCKARAMDKAQLFLRQMIDKGVRPNNVTYNVMIHGYCTLGQWKEARKMFREMTRQGLIPDIVTWTSFMASLCKHGRTKEAAEFFDSMTAKGHKPDLVMYHVLLHGYATKGCFADMINLFNSMATKGIVPDRQVFNILIDAHAKHGMMDEAMHIFTGMQGQGVCPDVWTYSTLISALCRMGRLADAMDNFSQMIGKGVQPNTVVYHSLIQGFSTHGDLRKAKELVYEMTNKGIPCPNIAFFSSVMDGICKEGRVMDAHDIFHLVTDIGLKPNIITFNTLIDGHCLVGEMEKAFGVLDSMVSAGIEADVFTYNTLAYGYCRCGRIDDGLILFREMLQNKPKPTTITYNIILDGLFRAGRTFAAKKMFVEMIETGITVSISTYSIILGGLCRNNCSDEAITLFQKLGAMNVKFDIKILNTMINAMFKVRRREEANGLFAAISASGMVPNASTYSVMIGNLLKEGSVEEAENMFSLMEKSGCAPDSRLINNIIRILLENGDIVKAGNYMSKVDGKSISLEASTTSLLMCLFSSKGKYREQISLLPVNYQFFNGVS

SEQ ID NO: 177 - protein, 788 aa, Triticum aestivum
MPGFSSTASMSPLRLRLHARHSSSASQPSRSQGWDPHAAFAAATQRARSGSLTPADAHHLFDELLRQANPVQERPLNNLLAAIARAPASSACRDGPALAVALFSRISQGARRRVAHPTACTYGILMDCCCRARRPDLSLALFGRLLRTGLKADQVVFSTLLKGLCHAKRSDEALHVLLHRMPELGCTPDVVVFNTVIHGFFREGQVGKACDMFLGMAQQGVAPNVVTYNSVIDALCKARAMDKAEYFLRQMVDNGVVPDNVTYNSLIHGYSSSGHQKEVLRVLKEMTSQGIIPDVVTCNSLMAYLCKNGRSKEAAEFFDSMVMKGLKPNIVSYSTLLHGYATEGCLVDMINLFNSMTRDGIQPDCHVLNILINAYAKSGMMDEAILMFKEMQKRGVSPDVVTYSTVIHGFCKMGRLDDAMVKFKQMTDMGVRPNPIVYHSLIKGFCTHGDLVKAKELVTEMRNKAMRPPDIKFFHSIMQNLCTEGRVIEARDILDLMVHIGMRPDVLIFNVLIGGYCLVCKMEDASKIFDDMVSYGLEPCNITYGILINGYCKNRRIDEGLILFKEMLCKGLKPTTFNYNVILDGLFLAGRTVAAKEKFNEMVESGVSVCIDTCSIVLGGLCKNSCSSEAITLFRKLSTMNVKLDIKIVNIIIGAFYRVKRNQEAKDLFAAITANGLVPNAVTYSIMMTNLIKEGSVEEADNLFLSMEKSGSTANSWMLNNIIRRLLERREIVKAGNYMSKVDVKSYSLEAKTVSLLISLFSREGKYRDHIKLLPTKYQFLKEPATVE

SEQ ID NO: 178 - protein, 715 aa, Triticum aestivum
MPGFSSTASMSPLRLRLHARHSSSASQPSRSQGWDPHAAFAAATQRARSGSLTPADAHHLFDELLRQANPVQERPLNNLLAAIARAPASSACRDGPALAVALFSRISQGARRRVAHPTACTYGILMDCCCRARRPDLSLALFGRLLRTGLKADQVVFSTLLKGLCHAKRSDEALHVLLHRMPELGCTPDVVVFNTVIHGFFREGQVGKACDMFLGMAQQGVAPNVVTYNSVIDALCKARAMDKAEYFLRQMVDNGVVPDNVTYNSLIHGYSSSGHQKEVLRVLKEMTSQGIIPDVVTCNSLMAYLCKNGRSKEAAEFFDSMVMKGLKPNIVSYSTLLHGYATEGCLVDMINLFNSMTRDGIQPDCHVLNILINAYAKSGMMDEAILMFKEMQKRGVSPDVVTYSTVIHGFCKMGRLDDAMVKFKQMTDMGVRPNPIVYHSLIKGFCTHGDLVKAKELVTEMRNKAMRPPDIKFFHSIMQNLCTEGRVIEARDILDLMVHIGMRPDVLIFNVLIGGYCLVCKMEDASKIFDDMVSYGLEPCNITYGILINGYCKNRRIDEGLILFKEMLCKGLKPTTFNYNVILDGLFLAGRTVAAKEKFNEMVESGVSVCIDTCSIVLGGLCKNSCSSEAITLFRKLSTMNVKLDIKIVNIIIGAFYRVKRNQEAKDLFAAITANGLVPNAVTYSIMPGLKLSSILKPSIVNRLSFCLSQFVFPR

SEQ ID NO: 179 - protein, 813 aa, Triticum aestivum
MSRVRLHLHRRLLSSTSPPSRSWSPRDAFAAAAERVRAGTLSRDDAHHLFDKLFRQATPVPNRSLNGFLASLARATSTTACIKDGPALALALFNRVCREEAGPQVAAPTVCTYNILMDCCCRARRPDLGLALFGCILRTGLKIEQITANTLLKCLCYAKRTGEAVNVLLHRMSELGCVPDVFAYTTVLKSLCEGSKSLQALDLLRTMAKDRGGCFPDVVAYNTVIHGFFKEGETGKACNLFHEMIHQGVEPDVVTYNLVIDALCKARAMDKAEVVLQQMVDKGVQPDTVTYTYMIHGYSISGRWKETAKLFREMTSRGLIPNIVTCNSFLTSLCKHGRSKEAAEFFDSMTAKGHKPNIVSYRILLHGYATKGCFPDMIDVFNSMESNGIAADCHVFNILIDAYAKRGMMDEAMLIPSKMQERRVNPDIVTYSSIIAGLSRLGRLTEAMEKFNQMIALGVQPDKAVYHTLIQGFCIDGDLAKAKQLVSEMMNRGIPRPNIVFFNSVINSMCKEGRVMDAHDIFELVIDMGERPDNILFNSLIDGYCLVGKMDKALKVLDVMESVGVEPDVITYNTLVNGYCRNGRIVDGLTLFREMPRKRIKPDTISYRIIMDGLFRSGRTVSARQMFHEMIESGTTVSISTYNVILGGLCRNNCADEAIALFQKLGSMNVKFSIAIVNTMINAMYKVQRKEEAKDLFAAISASGLVHNESTYAVMIRNLLKDGAVEDANDMFSSMDKSGIVPSSHLINDIIRMLLERGEIANAGNYLSKVDGKSISLEASTTSLMLSLFSREGKYREDMKLLPAKYQFFDGLC

SEQ ID NO: 180 - protein, 814 aa, Triticum aestivum
MYLIHLHLHRRLFSSTARPSRPSRAWSPHAAFAAATERVRAGNFSWEDAHNLFDESLRRATPVPERSLDGFCAALARGHASEACRDGPALALALFNHVCRDESGARVAPPTIFTYGILMNCCCRAHRPDLGLAFFGRLLRTGLKADLIVANTLLKCLCRAKRTDEAVNVLLHRMSELGCVPDAFSYSIVLKSLCDNGMSQQALDLLHMMAKEGGGCSPDVVAYSTVIHGFFKEGETGKACNLFHEMLQQGVEPNVWTYSSIIDALCKARAMDKAELVLQQMVNKGVQPDNVTYNCMIHGYSTSGRWKEAVKLFREMKSRGLIPDNFTCNSLMTYLCKHGRSKEGAEFFDAMTAKGHRDVISYCVLLHGYANEGCFADMIDLFNSMERNGIAANCYVFNILVNGYAKRGMTDEAMLIFTEMWEKGVSPNVVTYSTVIAALSRMGRLTDSMDKFNQMIAMGIQPNTAVYHSLIQGCLMHGGLVKAKELMFEMMNKGIPCPNIVFFSSVINSLCKEGRVMDAHDVFDLAIGIGERPNVIIFNSLIDGYCLVGKMDKAFKILHVMESVGVESDVVTYSALLDGYFKNRRIDGALTLFREMPRKRIKPDTVTYNIMLDGLFRAGRTVAAMEMFHEMTESGATVRISTYNIILGGLCRNSCVDEAIALFQKLQAMNVKFIIEIFNTMIDAMYKVQRKEEAKDLFAAIPASGLVPNESTYAVMIRNLLKDGAVEDADNMFSSMDNSGIVPSSRLINDIIRMLLEKGEIAKAGNYLSKVDGKSISLEASTTSLMLSLFSRKGKHLEDIKLLPANYQFFDGFG

SEQ ID NO: 181 - protein, 814 aa, Triticum aestivum
MSLIHLHLHRRLFSSTARPSRPSRAWSPHAAFAAATERVRAGNFSWEDAHNLFDELLRRATPVPKRSLDGFLAALARAHASEACRDGPALALALFNLVCRDESGARVAPPTIFTYGILMNCCCRAHCPDLGLAFFGRLLRTGLKADLIVANTLLKCLCHAKRTDEAVNVLLHRMSKLGCVPDTFSYNIVLKSLCDNGMSQQALDLLHMMAKEGGGCPPDVVAYSTVIHGFFKEGETGKACNLFHEMMHQGVEPNVWTYSSIIDALCKARAMDKTELVLQQMVNKGVQPDNVTYNCMIHGYSTSGRWKEAVKLFREMKSRGLIPDISTCNSLMTYLCKHGRSKEGAEFFDAMTAKGHRDVISYCILLHGYANEGCFADMIDLFNSMERNGIAANCYVFNILINGYAKCGMTDEAMLIFTEMWEKGVSPNVVTYSTVIAALSRMGRLTDSMDKFNQMIAMGIQPNTAVYHSLIQGCLMHGGLVKAKELMFDMMNKGIPRPNIVFFSSVINSLCKEGRVMDAHAVFDLAIGIGERPDVITFNSLIDGYCLVGKMDTAFKILDVMELVGVEPDVVTYSALLDGYFKNRRIDDALTFFREMPCKRIKPNTVTYGIMLGGLFRAGRTVAAMKMFHEMIESGATVRISTYNIILGGLCQTNCVDEAIALFQKLRAMNVKFNIETLNTMINAMYKVQRKEEAKDLFAAIPASGLVPNESTYAVMIRNLLKDGAVEDADNMFSSMDNSGIVPSSRLINDIIRMLLEKGEIAKAGNYLSKVDGKSISLEASTTSLMLSLFSRKGKHLEDIKLLPAKYQFFDGFG

SEQ ID NO: 182 - protein, 814 aa, Triticum aestivum
MSLIHLHLHRRLFSSTARPSRPSRAWSPHAAFAAATERVRAGNFSWEDAHNLFDELLRRATPVPKRSLDGFLAALARAHASEACRDGPALALALFNLVCRDESGARVAPPTIFSYGILMNCCCRAHCPDLGLAFFGRLLRTGLKADLIVANTLLKCLCHAKRTDEAVNVLLHRMSKLGCVPDTFSYNIVLKSLCDNGMSQQALDLLHMMAKEGGGCPPDVVAYSTVIHGFFKEGETGKACNLFHEMMHQGVEPNVWTYSSIIDALCKARAMDKTELVLQQMVNKGVQPDNVTYNCMIHGYSTSGRWKEAVKLFREMKSRGLIPDISTCNSLMTYLCKHGRSKEGAEFFDAMTAKGHRDVISYCILLHGYANEGCFADMIDLFNSMERNGIAANCYVFNILINGYAKCGMTDEAMLIFTEMWEKGVSPNVVTYSTVIAALSRMGKLTDSMDKFNQMIAMGIQPNTAVYHSLIQGCLMHGGLVKAKELMFDMMNKGIPRPNIVFFSSVINSLCKEGRVMDAHAVFDLAIGIGERPDVITFNSLIDGYCLVGKMDTAFKILDVMESVGVEPDVVTYSALLDGYFKNRRIDDALTFFREMPCKRIKPNTVTYGIMLGGLFRAGRTVAAMKMFHEMIESGATVRISTYNIILGGLCQTNCVDEAIALFQKLRAMNVKFNIETLNTMINAMYKVQRKEEAKDLFAAIPASGLVPNESTYAVMIRNLLKDGAVEDADNMFSSMDNSGIVPSSRLINDIIRMLLEKGEIAKAGNYLSKVDGKSISLEASTTSLMLSLFSRKGKHLEDIKLLPAKYQFFDGFG

SEQ ID NO: 183 - protein, 814 aa, Triticum aestivum; identical to SEQ ID NO: 181

SEQ ID NO: 184 - protein, 814 aa, Triticum aestivum; identical to SEQ ID NO: 181

SEQ ID NO: 185 - protein, 814 aa, Triticum aestivum; identical to SEQ ID NO: 181

SEQ ID NO: 186 - protein, 814 aa, Triticum aestivum; identical to SEQ ID NO: 182

SEQ ID NO: 187 - protein, 772 aa, Triticum aestivum
MPTTRLSSVSASSFKASSRKPRAPLAALAAATERVRAGTLSQEDAHHLFDKLLGQATAVPERGLNNFLAALARASPSATCSDGPGLAVTLFNRMSLGAGARVASPTLCTYSILMDCCCRAGRPDLVVTFFGRLLRLGLRLNVVSFNNLLKGLCQAKRSNEALDLLLHRMPELDRAPDVFSFNIVINGCFREGEVDKACNLFHEMPQLGVQPDVVTYNSIIIALSRAGAMGKAEVVLRQMVDKGIGPDVMTYSSLIHGYSTSGQWKAAVRVFKEMVSVGVRPNAVTLNSFMDSLCKHRRTKEARDIFDSMAAKGHKPNIVSYSTMLNGYAKQGCFDDMTGLFNSMVQNGIVPNNHVFNILIRAYSTRGLMDEAMHMFEVMKQQGVNPDVVDYLVVIDSLCKMGRMDAAMDKFNQMVNQGVSPDIGIYQCLVLGSCSNGDFVKAKELISEAVNRGLCYNSVFFYPVINNLSKEGNVKDAQDMFDFIVGIGHQPDVIMYNSLMDGYCLVGKVEEALTVLDAMKSADLQPDAITYVILLNGYCKIGRIDDGLSLFREMSLSGVKPTTIMYNIALDGLFRSRRTVSAKEKFHTIIESGIPVDVGTYTIVLSGLCKNNCTDEAIELFNKLRAMNMKINVIILNTMISAMFKTRRIEEAKDLFATIPAIGLVPSVVTYTVMMTNFIKEGLLAEADDMFLAMEKAGCAPDCRLLNHVVRVLLEKGAVVKAATYLAKLDAKELSLEASTVSLIVSLFSRRGKLREHVKLLPVKYQPPEMLG

SEQ ID NO: 188 - protein, 439 aa, Triticum aestivum
MINLFNSMEGNGIVADCNVFNILIDAYAKCGMMHEAMLIFTKMREQGVSPNVCTYATVIAALCRMGRLSDAMGKLNEMIATGLQPDVAIYTSLIQGFCTHGDLGKVKELVSEMMNKGMPRPNIVFFSSVINSLCKEGRVTDVHSIFDLAINIGERPDVITFTSLIDGYCLVGKMDKAFKVLDDMVSAGIEPDVYTYTTLLDGYSRNGRIDDGLTLFSEMMHKKIKPTTATYGTLLNGLFRAWRTASAKKMIHEMIESGTTVSLSIYAIILEGLRRNNCTDEAITLFQKVRAMNIKLDVAILNTMINAMFKVQRREEANDLFASISASGLVPNASTYRTMITNLLKEGLVEEAENMLSSMEKSCCAPDSRLINDTIRILLEQGEVVKAGNYMSRVDGKSISLEASTTSLLIRLFSREGKYREKIKLLPVKYQFFGGATVE

SEQ ID NO: 189 - protein, 439 aa, Triticum aestivum; identical to SEQ ID NO: 188

SEQ ID NO: 190 - protein, 826 aa, Triticum aestivum
MRNKKKSHEEAILPASDLLQQRLLTIPPARTRRPCPSHASPLPHHAHAPPPLLRRRRLSSSSTSSPSRRWDPRAAFAAATERVRAGTLSPEDAHHLFDELLLQANPVPYRSLNGFLAALARAPSSAALRDGPSLALALFNRVCREEAGPRVAPPTVCTYSILMDSCCRACRPNLGLAFFGRFLRTGLKADQIVASNLLKCLCHAKRTDEAVNMLLHRMSEFGCVPNVISYSIVLKSLCDDSRSQQALDLLQMVRKEGGACSFNVVAYSTVIHGFFKEGEVSKACDLFHEMMQQGIVPNVVTYSSIIDALCKVRAMDKAKLVLQQMVDNGVRPNMYTWNSFMYSLCKNGRSKEAAEFFDSMTSKGLKPNIIVYSTLLHGYATEGCLADMINLFNSMEGNGIVADCNVFNILIDAYAKCGMMHEAMLIFTKMREQGVSPNVCTYATVIAALCRMGRLSDAMGKLNKMIATGLQLDVAIYTSLIQGFCTHGDLGKVKELVSEMMNKGMPRPNIVFFSSVINSLCKQGRVTDAHSIFDLAINIGERPHVITFTSLIDGYCLVCKMDKAFKVLDAMVSAGIEPDVYTYTTLLDGYSRNGRIDDGLTLFSEMMHNKTKPTTATHGTLLNGLFRAGRTASAKKMIHEMIESGTTVSLSIYAIILEGLCRNNCADEAITLFQKVRAMNIKLDVAILNTMINAMFKVQRREEANDLFASISASGLVPNASTYRTMITNLLKEGLVEEAENMLSSMEKSCCAPDSRLINDIIRILLEQGEVVKAGNYMSRVDGKSISLEASTTSLLIRLFSREGKYREKIKLLPVKYQFFGGATVE

SEQ ID NO: 191 - protein, 439 aa, Triticum aestivum; identical to SEQ ID NO: 188

SEQ ID NO: 192 - protein, 439 aa, Triticum aestivum
MINLFNSMEGNGIVADCNVFNILIDAYAKCGMMHEAMLIFTKMREQGVSLNVCTYATVIAALCRMGRLSDAMGKLNEMIATGLQPDVAIYTSLIQGFCTHGDLGKVKELVSEMMNKGMPRPNIVFFSSVINSLCKEGRVTDAHSIFDLAINIGERPDVITFTSLIDGYCLVGKMDKAFKVLDAMVSAGIEPDVYTYTTLLDGYSRNGRIDDGLTLFSEMMHKKIKPTTATYGTLLNGLFRAGRTASAKKMIHEMIESGTTVSLSIYAIILEGLRRNNCTDEAITLFQKVRAMNIKLDVAILNTMINAMFKVQRREEANDLFASISASGLVPNASTYRTMITNLLKEGLVEEAENMLSSMEKSCCAPDSRLINDIIRILLEQGEVVKAGNYMSRVDGKSISLEASTTSLLIRLFSREGKYREKIKLLPVKYQFFGGATVE

SEQ ID NO: 193 - protein, 826 aa, Triticum aestivum; identical to SEQ ID NO: 190

SEQ ID NO: 194 - protein, 664 aa, Triticum aestivum
MDSCCRACRPNLGLAFFGRFLRTGLKADQIVASNLLKCLCHAKRTDEAVNMLLHRMSEFGCVPNVISYSIVLKSLCDDSRSQQALDLLQMVRKEGGACSFNVVAYSTVIHGFFKEGEVSKACDLFHEMMQQGIVPNVVTYSSIIDALCKVRAMDKAKLVLQQMVDNGVRPNMYTWNSFMYSLCKNGRSKEAAEFFDSMTSKGLKPNIIVYSTLLHGYATEGCLADMINLFNSMEGNGIVADCNVFNILIDAYAKCGMMHEAMLIFTKMREQGVSPNVCTYATVIAALCRMGRLSDAMGKLNKMIATGLQPDVAIYTSLIQGFCTHGDLGKVKELVSEMMNKGMPRPNIVFFSSVINSLCKEGRVTDAHSIFDLAINIGERPDVITFTSLIDGYCLVGKMDKAFKVLDAMVSAGIEPDVYTYTTLLDGYSRNGRIDDGLTLFSEMMHNKIKPTTATHGTLLNGLFRAGRTASAKKMIHEMIESGTTVSLSIYAIILEGLCRNNCADEAITLFQKVRAMNIKLDVAILNTMINAMFKVQRREEANDLFASISASGLVPNASTYRTMITNLLKEGLVEEAENMLSSMEKSCCAPDSRLINDIIRILLEQGEVVKAGNYMSRVDGKSISLEASTTSLLIRLFSREGKYREKIKLLPVKYPFFGGATVE

SEQ ID NO: 195 - protein, 439 aa, Triticum aestivum; identical to SEQ ID NO: 188

SEQ ID NO: 196 - protein, 439 aa, Triticum aestivum; identical to SEQ ID NO: 188

SEQ ID NO: 197 - protein, 664 aa, Triticum aestivum; identical to SEQ ID NO: 194

SEQ ID NO: 198 - protein, 439 aa, Triticum aestivum; identical to SEQ ID NO: 188

SEQ ID NO: 199 - protein, 664 aa, Triticum aestivum; identical to SEQ ID NO: 194

SEQ ID NO: 200 - protein, 664 aa, Triticum aestivum; identical to SEQ ID NO: 194

SEQ ID NO: 201 - protein, 820 aa, Triticum aestivum
MSRLRHSTSTAPMFHLRLLRCRFSSISTLPPSRSWSPHAAFAAATERVIAGTLSPEDAHRLFDELLRQATPVPARSLNGFLTALSRAPDTGACRDGPALFNRTRREEAGSRVVSSTIFTYGILMNCCGRTRRPELGLAFFGRVLRMGLKTNVVVATMVLQCLSSAKRTDEAVDILLHRISELGCVPDAFSYSIVLKSLCDDSRSQRALDLLHMWEKERGVCSPNVVTYNTGIHGFFKEGEVSKACNLFHEMVQKGVEPNVVTYSLTIDALCKARAMDKAELFLRQMIDKGVQPNNVTYNVMIHGYSTLGQWKEAGKMFREMTRQGLIPDLVTWTSFMASLCKHGRTKEAAEFFDSMTAKGHKPDLVTYHVLLHGHATEGCFADMINLFNAMATKGILPDRQVFNILIDAHAKHRMMDEAMHIFTGMQGQGVCPDVWTYSTLISALCRMGRLADAMDNFSQMIGKGVQLNTVVYHSLIQGFSTHGDLRKAKELVYEMTNKGIPCPNIAFFSSIMDSLCKEGRVMDAHDIFHLVTDIGLKPNIITFNTLIDGYCLVGEMEKAFGVLDSMVSAGIEADVFTYNTLAYGYCRCGRTDDGLILFREMVQNKPKPTTITYNIILDGLFRAGRTFAAKKMFLEMTETGITVSISTYSIILGGLCRNNCSDEAITLFQKLGAMDVKFDIKILNTMINAMFKVRRREEANGLFAGISASRMVPNASTYSVMIGNLLKEGSVEEAENMFSLMEKSGCAPDSRLINNIIRILLENGDIVKAGNYMSKVDGKSISLEASTTSLLMCLFSSKGKYREQISLLPVNYQFFNGVS

SEQ ID NO: 202 - protein, 820 aa, Triticum aestivum; identical to SEQ ID NO: 201

SEQ ID NO: 203 - protein, 824 aa, Triticum aestivum
MSRLRHSTSTVPMFHLRLLRCRFSSISTLPPSRSWSPHAAFAAATERVIAGTLSPEDAHRLFDELLRQATPVPARSLNGFLTALSRAPDTGACRDGPALALALFNRTRREEAGSRVVSSTIFTYGILMNCCRRTRRPELGLAFFGRVLRMGLKTNVVVATMVLQCLCSAKRTDEAVDILLHRMSELGCVPDAFSYSIVLKSLCDDSRSQRALDLLHMWEKERGVCSPNVVTYNTVIHGFFKEGEVSKACNLFHEIVQKGVEPNVVTYSLTIDALCKARAMDKAELFLRQMIDKGVQPNKVTYNVMIHGYSTLGQWKEAGKMFREMTRQGLIPDLVTWTSFMASLCKHGRTKEAADFFDSMTAKGHKPDLVTYHVLLHGHATEGCFADMINLFNAMATKGILPDRQVFNILIDAHAKHGMMDEAMHIFTGMQGQGVCPDVWTYSTLISALCRMGRLADAMDNFSQMIGKGVQPNTVVYHSLIQGFSTHGDLRKAKELVYEMTNKGIPCPNIAFFSSIMDSLCKEGRVMDAHDIFHLVTDIGLKPNIITFNTLIDGYCLVGEMEKAFGVLDSMVSAGIEADVFTYNTLAYGYCRCGRIDDGLILFREMVQNKPKPTTITYNIILDGLFRAGRTFAAKKMFLEMTETGITVSISTYSIILGGLCRNNCSDEAITLFQKLGAMDVKFDIKILNTMINAMFKVRRREEANGLFAGISASRMVPNASTYSVMIGNLLKEGSVEEAENMFSLMEKSGCAPDSRLINNIIRILLENGDIVKAGNYMSKVDGKSISLEASTTSLLMCLFSSKGKYREQISLLPVNYQFFNGVS

SEQ ID NO: 204 - protein, 820 aa, Triticum aestivum; identical to SEQ ID NO: 201

SEQ ID NO: 205 - protein, 820 aa, Triticum aestivum; identical to SEQ ID NO: 201

SEQ ID NO: 206 - protein, 820 aa, Triticum aestivum
MSRLRHSTSTAPMFHLRLLRCRFSSISTLPPSRSWSPHAAFAAATERVIAGTLSPEDAHRLFDELLRQATPVPARSLNGFLTALSRAPDTGACRDGPALFNRTRREEAGSRVVSSTIFTYGILMNCCGRTRRPELGLAFFGRVLRMGLKTNVVVATMVLQCLSSAKRTDEAVDILLHRMSELGCVPDAFSYSIVLKSLCDDSRSQRALDLLHMWEKERGVCSPNVVTYNTVIHGFFKEGEVSKACNLFHEMVQKGVEPNVVTYSLTIDALCKARTMDKAELFLRQMIDKGVQPNNVTYNVMIHGYSTLGQWKEAGKMFTEMTRQGLIPDLVTWTSFMASLCKHGRTKEAAEFFDSMTAKGHKPDLVTYHVLLHGHATEGCFADMINLFNAMATKGILPDRQVFNILIDAHAKHGMMDEAMHIFTGMQGQGVCPDVWTYSTLISALCRMGRLADAMDNFSQMIGKGVQPNTVVYHSLIQGFSTHGDLRKAKELVYEMTNKGIPCPNIAFFSSIMDSLCKEGRVMDAHDIFHLVTDIGLKPNIITFNTLIDGYCLVGEMEKAFGVLDSMVSAGIEADVFTYNTLAYGYCRCGRIDDGLILFREMVQNKPKPTTITYNIILDGLFRAGRTFAAKKMFLEMTETGITVSISTYSIILGGLCRNNCSDEAITLFQKLGAMDVKFDIKILNTMINAMFKVRRREEANGLFAGISASRMVPNASTYSVMIGNLLKEGSVEEAENMFSLMEKSGCAPDSRLINNIIRILLENGDIVKAGNYMSKVDGKSISLEASTTSLLMCLFSSKGKYREQISLLPVNYQFFNGVS

SEQ ID NO: 207 - protein, 825 aa, Triticum aestivum
MPRSRLRRYASTMPMSSLRPLHRSSSSTTSPARAWSPHAAFAAATERVRAGTVRPEDAHTLFDELLRQATPVPQRSLNGFLAALARAPASGACIRDGPALAVALFNRVCRDEAGPQVAALTGCTYSILMDCCCRARRPDLGLALFGRFLREGLKTDQIVANTFLKCLCYAKRTDEAVDVLLHRMSELGCVPDAFSYNTVLKSLCDNGMSQRALDLLQRMAKEGGVCSLNLVAYNTVIHGFFKEGETGKACSLFHEMMQQGVVPNVWTYTSIIDALCKARAMDKAELVLRQMVAKGAQPDIVTYTCMINGYATSGRLKEAAKMFREMKSRGLTPNIVTCGSLMTYLCKHGRSKEAREIFDSMTAKGHRANVVSYCILLHGYANEGCFADMIDLFNSMKSNGIAADCRVFNILINGYAKRGKMDEAMLIFTEMWEKGVSPDVVTYSTVIAALSRMGRLTDAMDKFNQMISMGVQPNTAVYHSLIQGSCMHGDLIKAKELVSEMMNKGIPRPSIAFFGSIINRLCKDGRVMDAHDIFDLVIDIGERPSVITFNSLIDGYCLVGKMDKAFKILDAMEVVGVESDVITYSTLLDGYFKNGRINDGLTLFREMPHKGIKPDTVTYGIMLDGLFRAGRTVAVRTVFHEMIESGITVDIPTYNIVLGGLCRNNCTDEAIALFQKLGAMSVKSNIAILNTMIDGMYKVRRREEANDLFATISASGLVPNESTYAVMIINLLKDGAVEEADNMFSSMEKTGIVPSSRLLNHIIRMLLEIGEIAKAGNYLSKVDGKSISLEASTTSLMLSFFSKKGKYREDMKLLPAKFQIFDGFG

SEQ ID NO: 208 - protein, 825 aa, Triticum aestivum
MPRSRLRRYASTMPMSSLRPLHRSSSSTTSPARAWSPHAAFAAATERVRAGTVRPEDAHTLFDELLRQATPVPQRSLNGFLAALARAPASGACIRDGPALAVALFNRVCRDEAGPQVAALTGCTYSILMDCCCRARRPDLGLALFGRFLREDLKTDQIVANTFLKCLCYAKRTDEAVDVLLHRMSELGCVPDAFSYNTVLKSLCDNGMSQRALDLLQRMAKEGGVCSLNLVAYNTVIHGFFKEGETGKACSLFHEMMQQGVVPNVWTYTSIIDALCKARAMDKAELVLRQMVAKGAQPDIVTYTCMINGYATSGRLKEAAKMFREMKSRGLTPNIVTCGSLMTYLCKHGRSKEAREIFDSMTAKGHRANVVSYCILLHGYANEGCFADMIDLFNSMKSNGIAADCRVFNILINGYAKRGKMDEAMLIFTEMWEKGVSPDVVTYSTVIAALSRMGRLTDAMDKFNQMISMGVQPNTAVYHSLIQGSCMHGDLIKAKELVSEMMNKGIPRPSIAFFGSIINRLCKDGRVMDAHDIFDLVIDIGERPSVITFNSLIDGYCLVGKMDKAFKILDAMEVVGVESDVITYSTLLDGYFKNGRINDGLTLFREMPHKGIKPDTVTYGIMLDGLFRAGRTVAVRTVFHEMIESGITVDIPTYNIVLGGLCRNNCTDEAIALFQKLGAMSVKSNIAILNTMIDGMYKVRRREEANDLFATISASGLVPNESTYAVMIINLLKDGAVEEADNMFSSMEKTGIVPSSRLLNHIIRMLLEIGEIAKAGNYLSKVDGKSISLEASTTSLMLSFFSKKGKYREDMKLLPAKFQIFDGFG

SEQ ID NO: 209 - protein, 825 aa, Triticum aestivum; identical to SEQ ID NO: 208

SEQ ID NO: 210 - protein, 825 aa, Triticum aestivum; identical to SEQ ID NO: 208

SEQ ID NO: 211 - protein, 825 aa, Triticum aestivum; identical to SEQ ID NO: 207

SEQ ID NO: 212 - protein, 825 aa, Triticum aestivum; identical to SEQ ID NO: 208

SEQ ID NO: 213 - protein, 825 aa, Triticum aestivum
MPRSRLRRYASTMPMSSLRPLHRSSSSTTSPARAWSPHAAFAAATERVRAGTLRPEDAHTLFDELLRQATPVPDRSLNGFLAALAHAPASGNCIRDGPALAVALFNRVCREEAGPRVAVLTGCTYSILMDCCCRARRPDLGLALFGRFLREGLKTDQIVANTFLKCLCYAKRTDEAVDVLLHRMSELGCVPDAISYNTVLKSLCDNGMSQRGLELLQMIAKEGGVCSLNLVAYNTVIYGFFKEGETGKARNLFHEMMQQGVEPDVVTYNLIIDALCKARAMDKAEVVLQQMISKGAQPDTVTYNCMINGYATSGRLKESAKLFREMKSRGLTPNNVTCNSFLSSLCKHGRSKEAREIFDSMTAKGRRANVVSYSILLHGYANEGCFADMIDLFNSMKSNGIAADCRVFTILIDAYAKRGMMDDAMHIFTEMQQQGVSPNVVTYSTVISALSRMGRLTDSMEKFNQMVALGVQPDRAIYRSLIQGFCMHGGLVKAKELVSQMINKGIPRPSIEFFNSVINSMCKEGRVMDAHDIFDLVIDIGERPDDITFNSLIDGYCLVGKMDKAFKILDAMEVVGVEPDVITYNTLLDGYFKNGRINDGLALFREMPHKRIKPDIVTYGIMLDGLFRAGRTVSARTMFHEMIESGITVNIFTYNIVLGGLCRNNCTDEAIALFQKLGAMSVKFNIATLNTMIDGMYKVRRREEANDLFATISASGLVPNESTYAVMIINLLKDGAVEEANNMFSSMEKTGIVPSSRLLNRIIRMLLEIGEIAKAGNYLSKVDGKSISLEASTTSLMLSFFSKKGKYREDMKLLPAKFQFFDGFG

SEQ ID NO: 214 - protein, 814 aa, Triticum aestivum
MSRIRLRRRRRHRLPSSTSRPSPSWSPHAACAAATERVRAGTLSPQDAHHLFDELLRQATPVPERSLNGFLAALSRATPSKACRDGPALVLSLFNRVCREEAGGMRVAPPTIFTYGVLMNCCCRTRRPELGLAFFGRLLRTGLKADKTIANTVLKCLCCAKRTDDAVKVLRRRMSELGCVPDAFSYAIVLKGLCDDNRSQQALDLLRMMAKEGVCSPDVVTYNTVIHGFFKEGKIGKACNLFHEMTKQGFVPNVVTYNSVISALCKARAMDNAELFLREMVDNGVQPNKVTYTSMIHGYSTLGQWKEATKLFREMTSSGLIPDIVTWNSFIDSLCKHGRSKEAAENFHSMSAKGHKPDIISYATLLHGYANEGSFPDMMSFFKSMEGDGIVANCQVFNILIDAYAKRGMMDEAMLIFTEMPGQGVNPNVVTYSTVIASLCRMGRLADAMNKFSEMIGTGVQPNTVVYHSLVQGLCTHGDLVKAKELISEMMNKGIPRPNIAFFSSIVHSLCKEGRVMDAHHIFDLVKDIGERSDIIMFNTLIDGYCLIGEMGKAVSVLDVMISAGIEPDIFTYNTLVNGYFKSGRIDDGLNLFREMSHKKIKPSTVTYNIILDGLFRAGRTVAAKKMLHEMIGCGTTVSLSTYNIILRGLCRNNCTDEAIAMFQKLRTINVKFNITTLNTMINSMYTVQRREEAKDLFAAISDSGLVPNVSTYGIMIRNLLKEGSVKEADNMFLSMEKSGCAPCSRLLNDTIRTLLEKGEIVKAGNYMSKVDGKSISLEASTSSLLLSLFSGKGKYREQIQLLPVKYQFFGGVS

SEQ ID NO: 215 - protein, 814 aa, Triticum aestivum; identical to SEQ ID NO: 214

SEQ ID NO: 216 - protein, 814 aa, Triticum aestivum
MSRIRLRRRRRHRLPSSTSRPSPTLSPHAACAAATERVRAGTLSPQDAHHLFDELLRQATPVPERSLNGFLAALSRATPSKACRDGPALVLSLFNRVCREEAGGMRVAPPTIFTYGVLMNCCCRTRRPELGLAFFGRLLRTGLKADKTIANTVLKCLCCAKRTDDAVKVLRRRMSELGCVPDAFSYAIVLKGLCDDNRSQQALDLLRMMAKEGVCSPDVVTYNTVIHGFFKEGKIGKACNLFHEMTKQGFVPNVVTYNSVINALCKARAMDNAELFLQQMVDDGVQPNKVTYTSMIHGYSTLGQWKEATKLFREMTSSGLIPDIVTWNSFIDSLCKHGRSKEAAEIFHSMSAKGHKPDIISYATLLHGYANEGSFPDMMSLFKSMEGDGIVANCQVFNILIDAYAKRGMMDEAMLIFTEMPGQGVNPNVVTYSTVIASLCRMGRLADAMNKFSEMIGTGVQPNTVVYHSLVQGLCTHGDLVKAKELISEMMNKGIPRPNIAFFSSIVHSLCKEGRVMDAHHIFDLVKDIGERSDIIMFNTLIDGYCLIGEMGKALRVLDAMISAGIEPDIFTYNTLVNGYFKSGRINDGLSLFREMSHKEIKPTTVTYNIILDGLFRAGRTVAAKKMLHEMTGCGTTVSLSTYNIILRGLCRNNCTDEAIAMFQKLHTMNVKFNITTLNTMINSMYTVQRREEAKDLFAAISDSGLVPNASTYDIMIRNLLKEGSVEEADNMFLSMEKSGCAPCSRLLNDTIRTLLEKGEIVKAGNYMSKVDGKSISLEASTSSLLLSLFSGKGKYREQIQLLPVKYQFFGGVS

SEQ ID NO: 217 - protein, 814 aa, Triticum aestivum
MSRIRLRRRRRHRLPSSTSRPSPSWSPHAACAAATERVRAGTLSPQDAHHLFDELLRQATPVPERSLNGFLAALSRATPSKACRDGPALVLSLFNRVCREEAGGMRVAPPTIFTYGVLMNCCCRTRRPELGLAFFGRLLRTGLKADKTIANTVLKCLCCAKRTDDAVKVLRRRMSELGCVPDAFSYAIVLKGLCDDNRSQQALDLLRMMAKEGVCSPDVVTYNTVIHGFFKEGKIGKACNLFHEMTKQGFVPNVVTYNSVISALCKARAMDNAELFLREMVDNGVQPNKVTYTSMIHGYSTLGQWKEATKLFREMTSSGLIPDIVTWNSFIDSLCKHGRSKEAAENFHSMSAKGHKPDIISYATLLHGYANEGSFPDMISFFKSMEGDGIVANCQVFNILIDAYAKRGMMDEAMLIFTEMPGQGVNPNVVTYSTVIASLCRMGRLADAMNKFSEMIGTGVQPNTVVYHSLVQGLCTHGDLVKAKELISEMMNKGIPRPNIAFFSSIVHSLCKEGRVMDAHHIFDLVKDIGERSDIIMFNTLIDGYCLIGEMGKAVSVLDVMISAGIEPDIFTYNTLVNGYFKSGRIDDGLNLFREMSHKKIKPSTVTYNIILDGLFRAGRTVAAKKMLHEMIGCGTTVSLSTYNIILRGLCRNNCTDEAIAMFQKLRTINVKFNITTLNTMINSMYTVQRREEAKDLFAAISDSGLVPNVSTYGIMIRNLLKEGSVKEADNMFLSMEKSGCAPCSRLLNDTIRTLLEKGEIVKAGNYMSKVDGKSISLEASTSSLLLSLFSGKGKYREQIQLLPVKYQFFGGVS

SEQ ID NO: 218 - protein, 814 aa, Triticum aestivum; identical to SEQ ID NO: 214

SEQ ID NO: 219 - protein, 814 aa, Triticum aestivum; identical to SEQ ID NO: 214

SEQ ID NO: 220 - protein, 814 aa, Triticum aestivum; identical to SEQ ID NO: 214

SEQ ID NO: 221 - protein, 812 aa, Triticum aestivum
MSNLRLLRRSSSSTSTPTSWSSRSWSPHAAFAAATERVRAGTLNQDDAHHLFDELLRQANPVPGRSLNGFLAALARATSSAACIRDGPTLAIALFNRLCREQAGLRVAPLTIHTYGILMDCCCRASRPELGLALFGRFLRTGLKTNEIVASTFLKCLCYAKRTDEAVNVLLHRMSELGCVPNAISYSIVLKSLCDNSMSLRALDLLQMMAKEGGACSPNVVAYSTVIHGFFKESETGKACNLFHEMMQQGVEPSVWTYSSIIDALCKARAMDKAELVLQQMVNKGVQPNNVTYNCMIHGYSTSGQWKEAAKLLREMKSRGLIPDIVTCNSFLASLCKHGRSKEAAEFLDSMTAKGHKPDIVSYRILLHGYGTEGCFADMIDVFYSMESNGIAADCHVFNILINGYAKRGMTEEAMLIFTEMQGQGVSPDVVTYSIVIAALSRMGRLTDAIEKFNEMTALEVQPDTTVYHSLIQGCCIDGYLVKAKELMFEMMNGGIPRPNIVFFSSVINSLCKEGRVMDAHDVLDLVIGIGERPNVITFNSLIDGYCLVGNMDKAFKILDVMESVGVEPNVVTYSALLDGYSKNRRIDDALTLFREMPRKRIKPDTVTYGIMLDGLFRAGRTVAAMEMFHEMTESGTTVDIFIYNIILGGLCRNNCVDEAIALFQKLRAMNVKFNIEILNTMINAMYKVQRKEEAKELFATISANGLVPNESTYAVMIRNLLKGGAVEDADNMFSSMDNSGIVPSSRLINDIIRMLLKKGEIAKAGNYLSKVDGKSISLEASTTSLLLSRKGKHQVDIKLLPAKYQFFDGFG

SEQ ID NO: 222 - protein, 812 aa, Triticum aestivum; identical to SEQ ID NO: 221

SEQ ID NO: 223 - protein, 812 aa, Triticum aestivum; identical to SEQ ID NO: 221

SEQ ID NO: 224 - protein, 774 aa, Triticum aestivum
MPTARLSSVSASSFKASSRKPRAPLAALAAATERVRAGTLSQEDAHHLFDELLGQATAVPERGLNNFLAALARASPSATCSDGPGLAVTLFNRMSLGAGARVASPTLCTYSILMDCCCRAGRPDLVVAFFGRLLRLGLRLNVISFNNLLKGLCQAKRSNEALDLLLHRMPELDCAPDVFSFNIVINGCFREGEVDKACNLFHEMPQLGVQPDVVTYNSIIIALSRAGAMGKAEVVLRQMVDKGIGPDVMTYNSLIHGYSTLGQWKAAVRVFKEMVSVGVLPNAVTLNSFMDSLCKHRRTKEARDIFDSMAAKGHKPNIASYSTMLNGYAKQGCFDDMTGLFNSMVQNGIVPNNHVFNILIRAYSTRGLMDEAMHMFEVMKQQGVNPDVVDYLVVIDSLCKMGRMDAAMDKFNQMVNQGVSPDIVVYQCLVLGSCSNGDFVKAKELISEAVNRGLCSNSVFFYPVINNLSKEGNVKDAQDMFDFIVGIGHQPDVIMYNSLMDGYCLVGKVEEAMTVLDAMKSAGLQPDAITYAILLNGYCKIGRIDDGLSLFREISLSRVKPTTIMYNIILDGLFCCGRTVFAKEEFDTMIESGIPVGIDTCTIVLSGLCKNNCTDEAIELFKKLCAMNVKFDVIILTTMISAMFKTRRVEEAKDLFATISTIGLVPSVVTYSVMMTNFIKEGSLAEADDMFLAMEKAGCAPDSRLLNHVVRVLLEKGAVVKAATYLGKLDGKQLSLEASTVSLIVSLFSRKGKLREHVKLLPVKYQPPESSTDN

SEQ ID NO: 225 - protein, 774 aa, Triticum aestivum; identical to SEQ ID NO: 224

SEQ ID NO: 226 - protein, 774 aa, Triticum aestivum; identical to SEQ ID NO: 224

SEQ ID NO: 227 - protein, 823 aa, Triticum aestivum
MSRLRSASTAPMPRLRLLSCRSYSISTLPPSRSWSPHAAFAAATERVSAGTLTPEDAHHLFDELLRQSTPVPARSLNGFLTALARARDTDACRDGPALALALFNRTRREEAGSRVVSPTIFTYGILMNCCCHTLRPDLGLAFFGRVLRMGLKTNVVVATTVLKCLCGAKRTDEAVNILLHRMSELGCVPDDFSYSIVLKSLCDDGRSQRALDLLQMWEKERGVCSPNVVAYNIVIHGFFKEGEVSKACDLFHAMVQRGVVPNVMTYTLTIDALCKARAMDKAKLFLRQMIDKGVRPNNVTYNVMIHGYSTLGQWKEAGKVFREMSRQGLIPDIVTWTSFMASLCKHGRTKEAANFFDSMTAKGHKPDLVTYHVLLHGYGTEGCFADMINLVNSMATKGIVPDRQVFNILIDAHAKHGMMDEAMHIFTGMQGQGVCPDVWTYSTIISALCRMGRLADGMDNFSQMIGKGVEPNTVVYHSLIQGFSTHGDLRKAKELVYEMRNKGIPCPNIAFFTSIMDSLCKEGRVMDAHDIFNLVTDIGEKPNVITFNTLIDGHCLVGEMEKAFGVLDSMVSAGIEADVFTYNTLAYGYCRCGRIDDGLILFREMLRKKPKPTTITYNIILDGLFRAGRTVAAKKMFHEMIEGGITVSMSTYSIILGGLCRNNCAEEAITLFQKLGAMNVKLDIRILNTMINAMFKVRRREEANSLFAAISASGMAPNASTYGLMIGNLLKEGSVQEAENMFSLMEKSGCAPGSRLINNIIRILLEKGDIVKAGNYMSKVDGKTISLEASTTSLLMCLFSSKGRYREQINLLPGNYQFFNGVS

SEQ ID NO: 228 - protein, 772 aa, Triticum aestivum
MPTARLSSVFASSFKSSLRKPRAPVAALAAATERVRARTLSQQDAHHLFDELLSQAAAVPERGLNNFLAALARAPPSSACSDGPGLAIALFNRMSQGAGARVVSPTLCTYSILMDCCCRAGRPDLVVAFFGRLIRLGLRLDVIAFSNLLKGLCKAKRSNEALDLLLHRMPELDCAPDVFSYSIVINGCFKEGEVDKACNLFHEMIQLGVQPDVAIYTSIIDALSKCGAMDKAEVVLRQMVDQGIGPDVMTYSSLIHGYSTLGQWKAAVRVLKEMVSVGVRPDAVTLNSFMDSLCKHRRTKEARDIFDSMAAKGHKPNIVSYTIMLNGYVKEGCFDDMTGLINSMLQNGIVPDHHVFNILINAYSKRGLMDEAMHMFEVMKQQGVNPDVVDYLVVMDSLCKMGKMAAAMDKFNQMINQGVSPNKAVYQCLVLGSCSHGDFVKAKELISEAVNRGLCSNSVFFYPVINDLCKEGKVKEAQDMFDFIVGIGQRPDVIMYNSLMDGYCLVGKVEEALRVLDAMKSAGLQPDAITYAILLNGYCKIGRIADGLSLFREMSLSGVKPTTIMYSIILDGLFRSGRTVSAKEKFNTMVESGLPVDVRTYNIVLHGLCRNNCTGEAIELFKKLCATNLKINVITFNTMISAMFKTRRIGEAKDLFATISAIGLVPSVVTYSVMTTNFIKEGLLAEADDMFLAMEKAGCAPDSRLLNHVVSVLLENGAVVKAATYLAKLDAKQLSLEASTVSLIVSLFSRKGKLREHVKLLPVKYQPPEMLG

SEQ ID NO: 229 - protein, 772 aa, Triticum aestivum; identical to SEQ ID NO: 228

SEQ ID NO: 230 - protein, 772 aa, Triticum aestivum
MPTARLSSVFASSFKSSLRKPRAPVAALAAATERVRARTLSQQDAHHLFDELLSQAAAVPERGLNNFLAALARAPPSSACSDGPGLAIALFNRMSQGAGARVVSPTLCTYSILMDCCCRAGRPDLVVAFFGRLIRLGLRLDVIAFSNLLKGLCKAKRSNEALDLLLHRMPELDCAPDVFSYSIVINGCFKEGEVDKACNLFHEMIQLGVQPDVAIYTSIIDALSKCGAMDKAEVVLRQMVDQGIGPDVMTYSSLIHGYSTLGQWKAAVRVLKEMVSVGVRPDAVTLNSFMDSLCKHRRTKEARDIFDSMAAKGHKPNIVSYTIMLNGYVKEGCFDDMTGLINSMLQNGIVPDHHVFNILINAYSKRGLMDEAMHMFEVMKQQGVNPDVVDYLVVMDSLCKMGKMAAAMDKFNQMINQGVSPNKAVYQCLVLGSCSHGDFVKAKELISEAVNRGLCSNSVFFYPVINDLCKEGKVKEAQDMFDFIVGIGQRPDVIMYNSLMDGYCLVGKVEEALRVLDAMKSAGLQPDAITYAILLNGYCKIGRIADGLSLFREMSLSGVKPTTIMYSIILDGLFRSGRTVSAKEKFNTMVESGLPVDVRTYNIVLHGLCRNNCTGEAIELFKKLCATNVKINVITFNTMISAMFKTRRIGEAKDLFATISAIGLVPSVVTYSVMTTNFIKEGLLAEADDMFLAMEKAGCAPNSRLLNHVVRVLLENGAVVKAATYLAKLDAKQLSLEASTVSLIVSLFSRKGKLREHVKLLPVKYQPPEMLD

SEQ ID NO: 231 - protein, 772 aa, Triticum aestivum; identical to SEQ ID NO: 228

SEQ ID NO: 232 - protein, 772 aa, Triticum aestivum; identical to SEQ ID NO: 230

SEQ ID NO: 233 - protein, 772 aa, Triticum aestivum; identical to SEQ ID NO: 228

SEQ ID NO: 234 - protein, 772 aa, Triticum aestivum
MPTARLSSIFTSSFKAPSRERRAPLAALAAATERVRAGTLSRQDAHHLFDELLSQAATVPVRTLNNFLAALARAPPSAACGNGPALAVTLFNGMSRGAGARVVSPTCCTYSILMDCCCRAGRPDLVVAFFGRLLRLGLRLNVISLSNLLKGLCQAKRTNEAVDLLLHRTPELDCVPDVFSYSIVINGCLKEGEVDKACNLFHEMPQLGVQPDVVTYTSIIDALSKSGAMVKAEVVLRRMVGQGIGPNVMTYTSLIHGYSASGQWKAAVRVFKEMVSVGVLPNAVTLNSFMDSLCKHRRTKEARVIFDSMAAKGQKPDIVSYSIMLNGYVKEGCFDDMTGLFNSMLQNGVVPNHHIFNILINAYAKRGLMDEAMHMFEVMRQQGVNPDVFGYQIIMDSFCKMGRMDAALDKFNQMVNQGVSPNKAVYQCLVLGSCSHGDFVKAKELICEAVNRGLCSNSVFFYPVINDLCKEGKVKEAQDMFDFILGIGQRPDVIMYNSLMDGYCLVGKVEEALRVLDAMKSAGLQPTAVTYAILLNGYCKIGKIADGLSLFREMSLSGVKPTTIMYNIILDGLFRSGRTVSAKEKFNTMVESGLPVDVRTYNIVLHGLCRNNCTGEAIELFKKLCATNVKINVITFNTMISAMFKTRRIGEAKDLFATISAIGLVPSVVTYSVMMTNFIKEGLLAEADDMFLAMEKAGCAPNSRLLNHVVRALLEKGAVVKAATYLAKLDAKQLSVEASTISLIVSLFSGEGKLREHVELLPVKYQPPEMLD

SEQ ID NO: 235 - protein, 772 aa, Triticum aestivum; identical to SEQ ID NO: 234

SEQ ID NO: 236 - protein, 772 aa, Triticum aestivum; identical to SEQ ID NO: 234

SEQ ID NO: 237 - protein, 772 aa, Triticum aestivum; identical to SEQ ID NO: 234

SEQ ID NO: 238 - protein, 772 aa, Triticum aestivum; identical to SEQ ID NO: 234

SEQ ID NO: 239 - protein, 772 aa, Triticum aestivum; identical to SEQ ID NO: 234

SEQ ID NO: 240 - protein, 786 aa, Triticum aestivum
MPRFSSTTPMSPLRRRLRARHSSSTSHSSRSWEPHAAFAAAAERARSGNLTPEDAHHLFDELLRQGNPVQDRPLNKLLSALARAPASAACRNGPALAVALFSRISQGARRRVADPTACTYGILMDCCCRAHRLDLTLAFFGGLLKTGLKAGVIQVCTLLKGLCRAKRADEALDVLLHRMPELGCTPNVVAYTTVIHGFFKEGQVGKACNLFHGMAQQGVAPNLVTYNSVIDALCKAKAMDKAEYFLGQMVDDGVVPDNVTYNSLIHGYSSSGHWKEAVRVFKEMTSRRVTADVHTYNMFMTFLCKHGRSKEAAGIFDTMALKGLKPDNVSYAILLHGYATVGCLVDMINLFNSMERDCILPDCRIFNILINAYAKSGKLDKAMLIFNEMQKQGVSPNAVTYSTVIDAFCKKGQLDDAMIKFNQMIDTGVRQGTAVYGSLIQGFCTHGDLVKAKELLTEMMNKGISPPDIKFFHSIMQNLGTEGRVIEARDVLGLIAHIGMRPNVCTFNILIGGYCLVGKMEDASKIFDDMMSYGLEPSNITYGILINGYCKNERINDGLILFKEMLRKGLKPTTFNYNVILDGLFLTGRTVAAKEKFDEMVESGVSVCIDTYSIVLGGLCRNNCSGEAITLFQKLSTMDVKFNITIVNIMIDAFYRVQRNQEAKDLFAAVSANGLVANVFTYTIMMKNLIKEGSVEEADNLFLSMEKSGCTADSYMLNLIVRMLLEKGELVKAGNYMSKVDAMSYSLEAETVSLLISLFSGKGKYREHIGLLPAKYRFREEAATVV

SEQ ID NO: 241 - protein, 503 aa, Triticum aestivum
MTSRRVTADVHTYNMFMTFLCKHGRSKEAAGIFDTMAMKGLKPDNVSYAILLHGYATEGCLVDMINLFNSMERDCILPDCRIFNILIKAYAKSGKLDKAMLIFNEMQKQGASPDAVTYSTVIDAFCKKGQLDDAMIKFNQMIDTGVPQGTAVYGSLIQGFCTHGDLVKAKELVTEMMNKGIPPPDIKFFHSIMQNLCTEGRVIEARDVLGLIAHIGMKPNVCTFNILSGGYCLVGKMEDASKIFDDMMSYGLEPSNITYGILINGYCKNERINDGLILFKEMLCKGLKPTTFNYNVILDGLFLTGRTVAAKEKFDEMVESGVSVCIDTYSIVLGGLCRNNCSGEAIMLFQKLSTMDVKFNITIVNIMIDAFYRVQRNQEAKDLFAAVSANGLVANVFTYTIMMKNLIKEGSVEEADDLFLSMEKSGCTADSYMLNLIVRMLLEKGELVKAGNYMSKVDAMSYSLEAETVSLLISLFSGKGKYREHIGLLPAKYQFREEAATIV

SEQ ID NO: 242 - protein, 786 aa, Triticum aestivum
MPRFSSTTPMSPLRRRLRARHSSSTSHSSRSWEPHAAFAAAAERARSGNLTPEDAHHLFDELLRQGNPVQDRPLNKLLSALARAPASAACRNGPALAVALFSRISQGARRRVAEPTACTYGILMDCCCRAHRLDLTLAFFGGLLKTGLKAGVIQVCTLLKGLCRAKRADEALDVLLHRMPELGCTPNVVAYTTVIHGFFKEGQVGKACNLFHGMAQQGVAPNLVTYNSVIDALCKAKAMDKAEYFLGQMVDDGVVPDNVTYNSLIHGYSSSGHWKEAVRVFKEMTSRRVTADVHTYNMFMTFLCKHGRSKEAAGIFDTMALKGLKPDNVSYAILLHGYATEGCLVDMINLFNSMERDCILPDCRIFNILINAYAKSGKLDKAMLIFNEMQKQGVSPNAVTYSTVIDAFCKKGQLDDAMIKFNQMIDTGVRQGTAVYGSLIQGFCTHGDLVKAKELLTEMMNKGLSPPDIKFFHSIMQNLGTEGRVIEARDVLGLIAHIGMRPNVCTFNILIGGYCLVGKMEDASKIFDDMMSYGLEPSNITYGILINGYCKNERINDGLILFKEMLRKGLKPTTFNYNVILDGLFLTGRTVAAKEKFDEMVESGVSVCIDTYSIVLGGLCRNNCSGEAITLFQKLSTMDVKFNITIVNIMIDAFYRVQRNQEAKDLFAAVSANGLVANVFTYTIMMKNLIKEGSVEEADNLFLSMEKSGCTADSYMLNLIVRMLLEKGELVQAGNYMSKVDAMSYSLEAETVSLLISLFSGKGKYREHIGLLPAKYRFREEAATVV

SEQ ID NO: 243 - protein, 788 aa, Triticum aestivum
MPRFSSTTPLSPLRLRRRLRARHSSSTSHSSRSWEPHAAFAAAAERARSGNLTPEDAHHLFDELLRQGNPVQDRPLNKLLSALARAPASATCRNGPALAVALFSRISQGARRRVAEPTACTYGILMDCCCRAHRLDLVFAFFGRLLRTGLKAGVIQVCTLLKGLCRAKRADEALDVLLHRMPELGCTPNVVAYTTVIHGFFKEGQVGKACNLFHGMAQQGVAPNLVTYNSVIDALCKAKAMDKAEYFLGQMVDDGVVPDNVTYNSLIHGYSSSGHWKEAVRVFKEMTSRRVTADVHTYNMFMTFLCKHGRSKEAAGIFDTMAMKGLKPDNVSYAILLHGYATEGCLVDMINLFNSMERDCILPDCRIFNILINAYAKSGKLDKAMLIFNEMQKQGANPDAVTYSTVIDAFCKKGQLDDAMIKFNQMIDTGVPQGTAVYGSLIQGFCTHGDLVKAKELVTEMMNKGIPPPDIKFFHSIMQNLCTEGRVIEARDVLGLIAHIGMKPNVCTFNILSGGYCLVGKMEDASKIFDDMMSYGLEPSNITYGILINGYCKNERINDGLILFKEMLCKGLKPTTFNYNVILDGLFLTGRTVAAKEKFDEMVESGVSVCIDTYSIVLGGLCRNNCSGEAIMLFQKLSTMDVKFNITIVNIMIDAFYRVQRNQEAKDLFAAVSANGLVANVFTYTIMMKNLIKEGSVEEADDLFLSMEKSGCTADSYMLNLIVRMLLEKGELVKAGNYMSKVDAMSYSLEAETVSLLISLFSGKGKYREHIGLLPAKYQFREEAATIV

SEQ ID NO: 244 - protein, 823 aa, Triticum aestivum
MSRLRLRHCSTTPMSRLRRRRRLSSSTSRPTPSWSPRAAFAAATERVRDGTLGPQDAHHLFDELFQQATPVPERPLNGFLAALTRATPSEACRDGPALALSLFNRVCREEAGMRVAPPTIFTYGVLMNCCCNTRRPELGLAFFGRLLRTGLKADKTVANTVLKCLCCAKRTDDAVKVLLHRMTELGCVPDAFSYAIVLKSLCDDNRSQQALDLLRMMAKEEGVCSPDVVTYNTVIHGFFKEGKIGKACNLFHEMTKQGFVPNVVTYNSVINALCKARAMDNAELFLRQMVDNGVQPNKVTYTSMIHGYSTLGRWKEATKLFREMTSSGLIPDIVTWNSFIDSLCKHGRSKEAAEIFDSMAAKGHRPNIVTYGILLHGYAREGCFADMMSLFNSMEGDGIVANCLVFTILIDAYAKRGMMDEAMLILTEMQGQGLSPDVFTYSTLISALCRKGRLADAMDKLSEMIGTGVQPNTVVYHSLIQGFCTHGDLVKAKELVYEMMTKGIPCPNTAFFSSIVHSLCKEGRVMDAHHIFDLVKDIGERSDIIMFNTLIDGYCLVGEMGKAFSVLDVMISAGIEPDIFTYNTLVNGYFKSGRIDDGLNLFREMSHKEIKPTTVTYNIILDGLFRAGRTVAAKKMLHEMIGCGTTVSLSTYTIILRGLCRNNCTDEAIVMFQKLRTINVKFNITTLNTMINSMYTVQRREEAKDLFAAISDSGLVPNASTYGIMIRNLLKEGSVEEADNMFSSMEKSGCAPCSRLLNDTIRTLLEKGEIVKAGNYMSKVDGKSISLEASTSSLLLSLFSGKGKYREQIQLLPVKYQFFDGVS

SEQ ID NO: 245 - protein, 823 aa, Triticum aestivum
MSRLRLRHCSTTPMSRLRRRRRLSSSTSRPTPSWSPRAAFAAATERVRDGTLGPQDAHHLFDELFQQATPVPERPLNGFLAALTRATPSEACRDGPALALSLFNRVCREEAGMRVAPPTIFTYGVLMNCCCHTRRPELGLAFFGRLLRTGLKADKTVANTVLKCLCCAKRTDDAVKVLLHRMTELGCVPDAFSYAIVLKSLCDDNRSQQALDLLRMMAKEEGVCSPDVVTYNTVIHGFFKEGKIGKACNLFHEMTKQGFVPNVVTYNSVINALCKARATDNAELFLRQMVDNGVQPNKVTYTSMIHGYSTLGRWKEATKLFREMTSSGLIPDIVTWNSFIDSLCKHGRSKEAAEIFDSMAAKGHRPNIVTYGILLHGYAREGCFADMMSLFNSMEGDGIVANCLVFTILIDAYAKQGMMDEAMLILTEMQGQGLSPDVFTYSTLISALCRKGKLADAMDKLSEMIGTGVQPNTVVYHSLIQGFCTHGDLVKAKELVYEMMTKGIPCPNTAFFSSIVHSLCKEGRVMDAHHIFDLVKDIGERSDIIMFNTLIDGYCLVGEMGKAFSVLDVMISAGIEPDIFTYNTLVNGYFKSGRIDDGLNLFREMSHKEIKPTTVTYNIILDGLFRAGRTVAAKKMLHEMIGCGTTVSLSTYTIILRGLCRNNCTDEAIVMFQKLRTINVKFNITTLNTMINSMYTVQRREEAKDLFAAISDSGLVPNASTYGIMIRNLLKEGSVEEADNMFSSMEKSGCAPCSRLLNDTIRTLLEKGEIVKAGNYMSKVDGKSISLEASTSSLLLSLFSGKGKYREQIQLLPVKYQFFDGVS

SEQ ID NO: 246 - protein, 823 aa, Triticum aestivum; identical to SEQ ID NO: 244

SEQ ID NO: 247 - protein, 823 aa, Triticum aestivum; identical to SEQ ID NO: 244

SEQ ID NO: 248 - protein, 823 aa, Triticum aestivum; identical to SEQ ID NO: 245

SEQ ID NO: 249 - protein, 823 aa, Triticum aestivum
MSRLRLRHCSTTPMSRLRRRRRLSSSTSRPTPSWSPRAAFAAATERVRDGTLGPQDAHHLFDELFQQATPVPERPLNGFLAALTRATPSEACRDGPALALSLFNRVCREEAGMRVAPPTIFTYGVLMNCCCHTRRPELGLAFFGRLLRTGLKADKTVANTVLKCLCCAKRTDDAVKVLLHRMTELGCVPDAFSYAIVLKSLCDDNRSQQALDLLRMMAKEEGVCSPDVVTYNTVIHGFFKEGKIGKACNLFHEMTKQGFVPNVVTYNSVINALCKARATDNAELFLRQMVDNGVQPNKVTYTSMIHGYSTLGRWKEATKLFREMTSSGLIPDIVTWNSFIDSLCKHGRSKEAAEIFDSMAAKGHRPNIVTYGILLHGYAREGCFADMMSLFNSMEGDGIVANCLVFTILIDAYAKRGMMDEAMLILTEMQGQGLSPDVFTYSTLISALCRKGKLADAMDKLSEMIGTGVQPNTVVYHSLIQGFCTHGDLVKAKELVYEMMTKGIPCPNTAFFSSIVHSLCKEGRVMDAHHIFDLVKDIGERSDIIMFNTLIDGYCLVGEMGKAFSVLDVMISAGIEPDIFTYNTLVNGYFKSGRIDDGLNLFREMSHKEIKPTTVTYNIILDGLFRAGRTVAAKKMLHEMIGCGTTVSLSTYTIILRGLCRNNCTDEAIVMFQKLRTINVKFNITTLNTMINSMYTVQRREEAKDLFAAISDSGLVPNASTYGIMIRNLLKEGSVEEADNMFSSMEKSGCAPCSRLLNDTIRTLLEKGEIVKAGNYMSKVDGKSISLEASTSSLLLSLFSGKGKYREQIQLLPVKYQFFDGVS

SEQ ID NO: 250 - protein, 819 aa, Triticum aestivum
MPRLRRFSTMPMLHLLRRSSSSTSTSPPLRSWSPHAAFAAATERVRAGALSPEDAHHLFDELLRQATPVPERSLNGFLAALARAPASAACIRDGPALAVALFNRVCREEAGLQVAAPTVCTYNILMGCCCRVHRPDLGLAFFGRLLRTGLKTEQITANTFLKCLCYAKRTEEAVNMLLHGMSELGCVPDAISYSIVLKSLCENSMSQRAFDLLHSGHSTCSFSVVAYSTVIHGFFKEGKTGKACNLFHEMIHQGVDPDVVTCNSIINALCKARAMDKAELVLRQMVDKGVQPNTVTYNCMIHGYSTSGRLKEAVKMLTEMTSRGLIPDIVTYNSLMTSLSKHRRSKEAAEIFYSMTAKGHKPNAASHRILLNGYATEGCFADMIDLFNSMESNGFVADCHVFTILIDAYAKRGMMDEAMLIFTEMREKGVSPDVFTYYTVIAALCRLGRLADAMDRFNEMTDMGVQPNTVVYHSLIQGFCMLGDLVKAKELVSEMMNKGIPRPDIAFFSSIINSLCKEGRVMDAQDIFELVISIDERPDVITFNSLIDGYGLIGQMDKAFGVLDAMVSAGIEPNVVTYSSLLDGYCRNGRIDDALILFREMPRKRIKPNTVTYGIILHGLFRAGRTVAARKMFDEMIEGGIPVSISIYNIILGGLCRNNCADEAITLFQKLGAMNVKFDIITLNTMINAMFKVRRREEANDLFAAISASGLVPNASTYGIMIENILKEGSVEEVDNMFSSMEKSGCAPSSRLINCIIRMLLEKGEIARAGNYLSKVDGKIISLEASTTSLLLSLFSREGKYRENIELLPAKYQFFIGFG

SEQ ID NO: 251 - protein, 570 aa, Triticum aestivum
MIHQGVDPDVVTYNSIIDGLCKARAMDKAELVLRQMVDKGVQPNTVTYNCMIHGYSTSGRLKEAVKMLTEMTSRGLIPDIVTYNSLMTSLCKHGRSKEVAEIFYSMTAKGHKPNAASYRILLNGYATEGCFADMIDLFNSRESNSFVSDCHVFTILIDAYAKRGMMDEAMLIFTEMREKGVSPDVFTYYTVIAALCRLGRLADAMDRFNEMTDMGVQPNTVVYHSLIQGFCMLGDLVKAKELVSEMMNKGIPRPDIAFFSSIINSLCKEGRVMDAQDIFELVISIDERPDVITFNSLIDGYGLIGQMDKAFGVLDAMVSAGIEPNVVTYSSLLDGYCRNGRIDDALILFREMPRKRIKPNTVTYGIILDGLFRAGRTVAARKMFDEMIEGGIPVSISIYNIILGGLCRNNCADEAITLFQKLGAMNVKFYIITLNTMINAMFKVRRREEANDLFAAISASGLVPNASTYGIMIENILKEGSVEEVDNMFSSMEKSDCAPSSRLINYIIRMLLEKGEIARAGNYLSKVDGKIISLEASTTSLLLSLFSREGKYRENIELLPAKYQFFNGFG

SEQ ID NO: 252 - protein, 570 aa, Triticum aestivum; identical to SEQ ID NO: 251

SEQ ID NO: 253 - protein, 397 aa, Triticum aestivum
MIHQGVDPDVVTYNSIIDGLCKARAMDKAELVLRQMVDKGVQPNTVTYNCMIHGYSTSGRLKEAVKMLTEMTSRGLIPDIVTYNSLMTSLCKHGRSKEAAEIFYSMTAKGHKPNAASYRILLNGYATEGCFADMIDLFNSMKSNGFVADCHVFTILIDAYAKRGMMDEAMLIFTEMREKGVSPDVFTYYTVIAALCRLGRLADAMDRFNEMTDMGVQPNTVVYHSLIQGFCMLGDLVKAKELVSEMMNKGIPRPDIAFFSSIINSLCKEGRVMDAQDIFELVISIDERPDVITFNSLIDGYGLIGQMDKAFGVLDAMVSAGIEPNVVTYSSLLDGYCRNGRIDDALILFREMPRKRIKPNTVTYGIILDGLFSAGRTVAARKMFDEMIEGGKPSSRC

SEQ ID NO: 254 - protein, 819 aa, Triticum aestivum
MPRLRRFSTMPMLHLLRRSSSSTSTSPPLRSWSPHAAFAAATERVRAGALSPEDAHHLFDELLRQATPVPERSLNGFLAALARAPASAACIRDGPALAVALFNRVCREEAGLQVAAPTVCTYNILMGCCCRVHRPDLGLAFFGRLLRTCLKTEQITANTFLKCLCYAKRTEEAVNMLLHGMSELGCVPDAISYSIVLKSLCENSMSQRAFDLLHSGHSTCSFSVVAYSTVIHGFFKEGKTGKACNLFHEMIHQGVDPDVVTYNSIINALCKARAMDKAELVLRQMVDKGVQPNTVTYNCMIHGYSTSGRLKEAVKMLTEMTSRGLIPDIVTYNSLMTSLSKHRRSKEAAEIFYSMTAKGHKPNAASYRILLNGYATEGCFADMIDLFNSMESNGFVADCHVFTILIDAYAKRGMMDEAMLIFTEMREKGVSPDVFTYYTVIAALCRLGRLADAMDRFNEMTDMGVQPNTVVYHSLIQGFCMLGDLVKAKELVSEMMNKGIPRPDIAFFSSIINSLCKEGRVMDAQDIFELVISIDERPDVITFNSLIDGYGLIGQMDKAFGVLDAMVSAGIEPNVVTYSSLLDGYCRNGRIDDALILFREMPRKRIKPNTVTYGIILHGLFRAGRTVAARKMFDEMIEGGIPVSISIYNIILGGLCRNNCADEAITLFQKLGAMNVKFDIITLNTMINAMFKVRRREEANDLFAAISASGLVPNASTYGIMIENILKEGSVEEVDNMFSSMEKSGCAPSSRLINCIIRMLLGKGEIARAGNYLSKVDGKIISLEASTTSLLLSLFSREGKYRENIELLPAKYQFFIGFG

SEQ ID NO: 255 - protein, 570 aa, Triticum aestivum
MIHQGVDPDVVTYNSIIDGLCKARAMDKAELVLRQMVDKGVQPNTVTYNCMIHGYSTSGRLKEAVKMLTEMTSRGLIPDIVTYNSLMTSLCKHGRSKEAAEIFYSMTAKGHKPNAASYRILLNGYATEGCFADMIDLFNSMKSNGFVADCHVFTILIDAYAKRGMMDEAMLIFTEMREKGVSPDVFTYYTVIAALCRLGRLADAMDRFNEMTDMGVQPNTVVYHSLIQGFCMLGDLVKAKELVSEMMNKGIPRPDIAFFSSIINSLCKEGRVMDAQDIFELVISIDERPDVITFNSLIDGYGLIGQMDKAFGVLDAMVSAGIEPNVVTYSSLLDGYCRNGRIDDALILFREMPRKRIKPNTVTYGIILDGLFRAGRTVAARKMFDEMIEGGIPVSISIYNIILGGLYRNNCADEAITLFQKLGAMNVKFYIITLNTMINAMFKVRRREEANDLFAAISASGLVPNASTYGIMIENILKEGSVEEVDNMFSSMEKSDCAPSSRLINYIIRMLLEKGEIARAGNYLSKVDGKIISLEASTTSLLLSLFSREGKYRENIELLPAKYQFFNGFG

SEQ ID NO: 256 - protein, 570 aa, Triticum aestivum; identical to SEQ ID NO: 255

SEQ ID NO: 257 - protein, 819 aa, Triticum aestivum; identical to SEQ ID NO: 250

SEQ ID NO: 258 - protein, 819 aa, Triticum aestivum
MPRLRRFSTMPMLHLLRRSSSSTSTSPPLRSWSPHAAFAAATERVRAGALSPEDAHHLFDELLRQATPVPERSLNGFLAALARAPASAACIRYGPALAVALFNRVCREEAGLQVAAPTVCTYNILMGCCCRAHRPDLGLAFFGRLLRTGLKTEQITANTFLKCLCYAKRTEEAVNVLLHGMSELGCVPDAISYSIVLKSLCENSMSQRALDLLHSGHSTCSFSVVAYSTVIHGFFKEGKTGKACNLFHEMIHQGVDPDVVTYNSIINALCKARAMDKAELVLRQMVDKGVQPNTVTYNCMIHGYSTSGRLKEAVKMLTEMTSRGLIPDIVTYNSLMTSLCKHRRSKEAAEIFYSMTAKGHKPNAASYRILLNGYATEGCFADMIDLFNSMESNGFVADCHVFTILIDAYAKRGMMDEAMLIFTEMREKGVSPDVFTYYTVIAALCRLGRLADAMDRFNEMTDMGVQPNTVVYHSLIQGFCMLGDLVKAKELVSEMMNKGIPRPDIAFFSSIINSLCKEGRVMDAQDIFELVISIDERPDVITFNSLIDGYGLIGQMDKAFGVLDAMVSAGIEPNVVTYSSLLDGYCRNGRIDDALILFREMPRKRIKPNTVTYGIILHGLFRAGRTVAARKMFDEMIEGGIPVSISIYNIILGGLCRNNCADEAITLFQKLGAMNVKFDIITLNTMINAMFKVRRREEANDLFAAISASGLVPNASTYGIMIENILKEGSVEEVDNMFSSMEKSGCAPSSRLINCIIRMLLEKGEIARAGNYLSKVDGKIISLEASTTSLLLSLFSREGKYRENIELLPAKYQFFIGFG

SEQ ID NO: 259 - protein, 819 aa, Triticum aestivum; identical to SEQ ID NO: 250

SEQ ID NO: 260 - protein, 819 aa, Triticum aestivum; identical to SEQ ID NO: 250

SEQ ID NO: 261 - protein, 465 aa, Triticum aestivum
  REGION 17..21: note = misc_feature - Xaa can be any naturally occurring amino acid
MTAKGHKPNAASHRILXXXXXTEGCFADMIDLFNSMESNGFVADCHVFTILIDAYAKRGMMDEAMLIFTEMREKGVSPDVFTYYTVIAALCRLGRLADAMDRFNEMTDMGVQPNTVVYHSLIQGFCMLGDLVKAKELVSEMMNKGIPRPDIAFFSSIINSLCKEGRVMDAQDIFELVISIDERPDVITFNSLIDGYGLIGQMDKAFGVLDAMVSAGIEPNVVTYSSLLDGYCRNGRIDDALILFREMPRKRIKPNTVTYGIILDGLFRAGRTVAARKMFDEMIEGGIPVSISIYNIILGGLYRNNCADEAITLFQKLGAMNVKFYIITLNTMINAMFKVRRREEANDLFAAISASGLVPNASTYGIMIENILKEGSVEEVDNMFSSMEKSDCAPSSRLINYIIRMLLEKGEIARAGNYLSKVDGKIISLEASTTSLLLSLFSREGKYRENIELLPAKYQFFNGFG

SEQ ID NO: 262 - protein, 570 aa, Triticum aestivum; identical to SEQ ID NO: 251

SEQ ID NO: 263 - protein, 819 aa, Triticum aestivum; identical to SEQ ID NO: 250

SEQ ID NO: 264 - protein, 502 aa, Triticum aestivum
MLDIGVVKDRRRRRRNNGARNDTGDRNCCCMETMMPGRSLNGFLAALARATSSAAPACIRDGPVLVVALFNRLCREQAVVRVAPLTVHTYGILMDCCCRTSRPDLGLAFFGRLLRTGLKTNEIVATTFLKCLCYAKRTDEAVNVLLHRMPELGCVPDAFAYSTVLKSLCDNSMSQQGLDLLHMMAKEGGGCSPNVVAYSTVIHGFFKEGEIGKACNLFHEMMQQGVEPNVWTYSSIIDALCKARAMDKAELVLQQMVNKGVQPNNVTYSCMIHGYSTSGRWKEAAKLLREMKSRGLILDIVTRNSFLASLCKHGRSKEAAEFLDSMTAKGHKPDIVSYCILLHGYGTEGCFADMIDVFYSMESNGIAADCHVFNILINGYAKRGMTEEAMLIFTEMRGQGVSPDVVTYSIVIAALSRMGKLTDAIEKFNEMTALEVQPDTTVYHSLIQGCCIDGDLVKAKELMFEMMNGGIPRPNIVFFNSVINSLCKEGRVMDAHDVLDLL

SEQ ID NO: 265 - protein, 264 aa, Triticum aestivum
MDKAFKILDVMESVGVEPNVVTYSTLLDGYSKNRRIDDALTLFREMPRKRIKPDTVTYGIMLDGLFRAGRTVAAMEMFHEMIESGTTVDILIYNIKLGGLCRHNCVDEAIALFQKLRAMNVKFNIEILNTMINAMYKVQRKEEAKELFATISANGLVPNESTYAVMIRNLLKDGAVEDADNMFSSMDNSGIVPSSRLINDIIRMLLEKGEIAKAGNYLSKVDGKSISLEASTTSLMLSLFSRKGKHQEDIKLLPAKYQIFDGFS

SEQ ID NO: 266 - protein, 822 aa, Triticum aestivum
MAEIRPKSTFCGRKSKHTVGVEVEEELRRRRRMLDIGVVKDRRRRRRNNGARNDTGDRNCCCMETMMPGRSLNGFLAALARATSSAAPACIRDGPVLVVALFNRLCREQAVVRVAPLTVHTYGILMDCCCRTSRPDLGLAFFGRLLRTGLKTNEITATTFLKCLCYAKRTDEAVNVLLHRMPELGCVPDAFAYSTVLKSLCDNSMSQQGLDLLHMMAKEGGGCSPNVVAYSTVIHGFFKEGEIGKACNLFHEMMQQGVEPNVWTYSSIIDALCKARAMDKAELVLQQMVNKGVQPNNVTYSCMIHGYSTSGRWKEAAKLLREMKSRGLILDIVTRNSFLASLCKHGRSKEAAEFLDSMTAKGHKPDIVSYCILLHGYGTEGCFADMIDVFYSMESNGIAADCHVFNILINGYAKRGMTEEAMLIFTEMRGQGVSPDVVTYSIVIAALSRMGKLTDAIEKFNEMTALEVQPDTTVYHSLIQGCCIDGDLVKAKELMFEMMNGGIPRPNIVFFNSVINSLCKEGRVMDAHDVLDLVIGIGERPNVITFNSLIDGYCLVGNMDKAFKILDVMESVGVEPNVVTYSTLLDGYSKNRRIDDALTLFREMPRKRIKPDTVTYGIMLDGLFRAGRTVAAMEMFHEMIESGTTVDILIYNIKLGGLCRNNCVDEAIALFQKLRAMNVKFNIEILNTMINAMYKVQRKEEAKELFATISANGLVPNESTYAVVIRNLLKGGAVEDADNMFSSKDNSGIVPSSRLINDIIRMLLEKGEIAKAGNYLSKVDGKSISLEASTASLMLSLFSRKGKHQEDIKLLPAKYQFFDGFG

SEQ ID NO: 267 - protein, 502 aa, Triticum aestivum; identical to SEQ ID NO: 264

SEQ ID NO: 268 - protein, 264 aa, Triticum aestivum; identical to SEQ ID NO: 265

SEQ ID NO: 269 - protein, 822 aa, Triticum aestivum; identical to SEQ ID NO: 266

SEQ ID NO: 270 - protein, 822 aa, Triticum aestivum; identical to SEQ ID NO: 266

SEQ ID NO: 271 - protein, 502 aa, Triticum aestivum; identical to SEQ ID NO: 264

SEQ ID NO: 272 - protein, 264 aa, Triticum aestivum; identical to SEQ ID NO: 265

SEQ ID NO: 273 - protein, 392 aa, Triticum aestivum
MSQQGLDLLHMMAKEGGGCSPNVVAYSTVIHGFFKEGEIGKACNLFHEMMQQGVEPNVWTYSSIIDALCKARAMDKAELVLQQMVNKGVQPNNVTYSCMIHGYSTSGRWKEAAKLLREMKSRGLIPDIVTRNSFLASLCKHGRSKEAAEFLDSMTAKGHKPDIVSYCILLHGYGTEGCFADMIDLFNSMESNGIAADCHVFNILINGYAKRGMTEEAMLIFTEMRGRVSPDVVTYSIVIAALSRMGKLTDAIEKFNEMTALEVQPDTTVYHSLIQGCCIDGDLVKAKELMFEMMNGGIPRPNIVFFNSVINSLCKEGRVMDAHDVLDLVIGIGERPNVITFNSLIDGYCLVGNMDKAFKILDVMESVGVEPNVVTYSAILMAILKTEGLMML

SEQ ID NO: 274 - protein, 769 aa, Triticum aestivum
MPAARLSSFKAPSRERRPPLAALAAATERVRAGTLSRQDAHHLFDELLSQAATVPVRKLNNFLAALARAPPSAACSDGPGLAIALFNRMSRGAGARVVSPTLCTYSILMDCCCRARRPDLVVAFFGRLLRLGLRLEVISFNNLLKGLCQAKRSNEALDMLLHRTPELHCAPDVFSYNIVINGCLKEGEVDKACNLFHEMPQLGVQPDVVTYTSIMDALSKSGAMDKAEVLLRQMVDQGIEPNIKTYSYLIHGYSTFGQWKEALRVFKEMASLGVVPDVVTLTSLIDSLCKHRRTKEAREIFDSMAAKGLKPNIVSYSTMPNGYVKEGSFEDMTDLFNSMVRNGIVPNHHIFNILINAYAKRGVMDEAMHMFEVMRQQGVNPDVFDYQIIMDSLCKMGRMDAALDKFNQMVNQGVSPNKAVYQCLVLGSCSHGHFVKAKELISEVVNRGLCSNTVFFYPVINGLCKEGKVKEAQDMFDFILGIGQRPDVIMYTSLMDGYCLVGEVEKALSVLDAMKSAGLQPDDVVYATLLNGYCKIGRIADGLSLFREMSLSGVKPMTIIYNIILDGLFCSGRTVCAKEKFNTMTESGIPVGVDTYNIVLSGLCRNNCTDEAIELFKKLRATNVKIDVITLTTMISAMFKTRRIEEAKDLFATISAIGFMPSVVTYSVMMTNFIKEGLLAEADDMFLTMEKASCASNSSLLNQVVRALLEKGAVVKAATYLAKLDAKQLSVEASTISLIVSLFSREGKLREHVELLPVKYQPPQSSADN

SEQ ID NO: 275 - protein, 769 aa, Triticum aestivum; identical to SEQ ID NO: 274

SEQ ID NO: 276 - protein, 406 aa, Triticum aestivum
MDEAMHMFEVMRQQGVNPDVFDYQIIMDSLCKMGRMDAALDKFNQMVNQGVSPNKAVYQCLVLGSCSHGHFVKAKELISEVVNRGLCSNSVFFYPVINGLCKEGKVKEAQDMFDFILGIGQRPDVIMYTSLMDGYCLVGEVEKALSVLDAMKSAGLQPDDVVYATLLNGYCKIGRIADGLSLFREMSLSGVKPMTIIYNIILDGLFCSGRTVCAKEKFNTMTESGIPVGVDTYNIVLSGLCRNNCTDEAIELFKKLRATNVKIDVITLTTMISAMFKTRRIEEAKDLFATISAIGLVPSVVTYSVMMTNFIKEGLLAEADDMFLTMEKASCASNSSLLNQVVRALLEKGAVVKAATYLAKLDAKQLSVEASTISLIVSLFSREGKLREHVELLPVKYQPPQSSADN

SEQ ID NO: 277 - protein, 769 aa, Triticum aestivum; identical to SEQ ID NO: 274

SEQ ID NO: 278 - protein, 275 aa, Triticum aestivum
MDGYCLVGEVEKALSVLDAMKSAGLQPDDVVYATLLNGYCKIGRIADGLSLFREMSLSGVKPTTIIYNIILDGLFCSGRTVCAKEKFNTMTESGIPVGVDTYNIVLSGLCRNNCTDEAIELFKKLRATNVKIDVITFNTMISAMFKTRRIEEAKDLFATISAIGLVPSVVTYSVMMTNFIKEGLLAEADDMFLTMEKASCAPNSSLLNQVVRALLEKGAVVKAATYLAKLDAKQLSVEASMISLIVSLFSREGKLREHVELLPVKYQPPQSSADN

SEQ ID NO: 279 - protein, 785 aa, Triticum aestivum
MSPLRLRLRLRPRLHARHSYSTSHPSRSQGWDPHAAFAAATERARSGNLTSEDAHKLFDQLLLQANPVNMRLPNDLLTALARAPASAACSNGPALALALFSRLSQGARQRVVQPTACTYGILMDCCCRANRQDLALAFFARLLRTGLKAGVIEVNTLLKGLCRAKRADEALDILLHRMPELGCTPNVVAYNTVIHGFFQEGQAGKACSLFHEMAQQGVAPSLVTYNSVIDALCKARAMDKAEYFLRQMVDDGVVPDNVTYNSLIHGYSSSGHWKEAVRVFKEMTSRRVKPIVHTHNMFMTFLCKHGRSKEAAGIFDTMAMKGLKHNNVSYAILLHGYATEGCLVDMINLFNSMERYCILPDCRIFNILINAHAKSGKLDKAMLIFNEMQKQGVSPNAVTYSTIIHAFCKKGRLDDAVIKFNQMIDTGVRQGTAVYRSLIQGFCTHGDLVKAKELLTEMMNKGMLPPDIAFFNSIMQNLCTEGRVIEARDVLGLIAHIGMRPDVCTFNILIGGYCLVGKMEHASKIFDDMMSYGLEPSNITYGILINGYCKNRRIDDGLILFKEMLHKGLKPTTFNYNVILDGLFLAGRTVAAKEKFDEMVESGVSVCIGTYSIVLGGLCRNNCSGEAITLFQKLSTMDVKFNIIIVNIMIDAFYKVQRNQEAKDLFAAVSANGLVANVFTYTIMMKNLIKEGSVEEADDLFLSMEKSSCTADSYMLNLIVRMLLGKGEIVKAGNYISKIDAKSYSLEAKTVSLLISLFSGKGKYREHIGLLPAKYRFREEAATVV

SEQ ID NO: 280 - protein, 505 aa, Triticum aestivum
MSPLRLHARRSYSTSHPPRSQGWDPHAAFAAATERARSGNLTSEDAHKLFDQLLLQANPVNMRLPNDLLTALARAPASAACSNGPALALALFSRLSQGARQRVVQPTACTYGILMDCCCRANRQDLALAFFARLLRTGLKAGVIEVNTLLKGLCRAKWADEALDILLHRMPELGCTPNVVAYNTVIHGFFQEGQAGKACSLFHEMAQQGVAPSLVTYNSVIDALCKARAMDKAEYFLRQMVDDGVIPDNVTYNSLIHGYSSSGHWKEAVRVFKEMTSRRVKPNVHTHNMFMTFLCKHGRSKEAAGIFDTMAMKGLKHNNVSYAILLHGYATEGCLVDMINLFNSMERYCILPDCRIFNILIHAHAKSGKLDKAMLIFNEMQKQGVSPNAVTYSTIIHAFCKKGRLDDAVIKFNQMIDTGVRQGTAVYRSLIQGFCTHGDLVKAKELLTEMMNKGMLPPDIAFFNSIMQNLCTEGRVIEARDVLGLIAHIGMRPDVCTFNILVDTA

SEQ ID NO: 281 - protein, 785 aa, Triticum aestivum; identical to SEQ ID NO: 279

SEQ ID NO: 282 - protein, 669 aa, Triticum aestivum
MRSSPAPSSSASSVQNGQMKLLNVLLHRTSVLGCVPNSFSYNIVLKSLCDDSRSQQALGLLQVMAKGDDCSPGVLSYSTLIHGFFKEGEVGKACNLFHEMMRQGVVPDVVTYSSIIDALCKAGAMDKAELFLRQMVDNSVRPDTVTYTSMIHGYSTLGRWKEATKMFREMTSRGLIPNIVTWNSFMASLCKHGKSKEAAEIFFSMAARGHKPDIISYTILLHGYANEGSFADMMNLFNSMVGDGIVANCQVFNILIDAYAKQRMMDEAMIILNKMRGQGLSPDVFTYSTLVSALCKMVRLADAMGKFSQMIGRGVQPNTVVYHSVVQGLCTHGVLVKAKELVNEMMNKGMLRPNIAFFNSIMDNLCNEGRVVDAHHIFDLITDIGEKPDVITFSTLIDGYCLVGEMEKACGVLDAMVSAGIEPDVITYNTLVSGYCKSGRIDDGLNLFREMFHMEVKPTTVTYNIILDGLFHAGRTVAAKKMLHEMIGSGTPVSMHTYDIFIRGLCRNDCTDEAIALFQKLGALNVKFDIAILNSMINAMYKVQRREEANKLFAAISTSGLVPNASTYGIMIRNLLKEGSVEEAEDMFSSMEKSDCALSSRLINDIIRMLLEKGEIVKAGEYMSKVDGKSISLEASTSSLLLSLFSGKGKYREQIQLLPAKYQFFDGTI

SEQ ID NO: 283 - protein, 669 aa, Triticum aestivum; identical to SEQ ID NO: 282

SEQ ID NO: 284 - protein, 812 aa, Triticum aestivum
MSCLHLLRRRTSSFTPTSPPSRSWSPHAAFAAATERVRAGTLTPQDAHHLFDQLLRQSTPVPGQALNGFLAGLARARDTDACRDGPSLALTLFNRVCREEAGRRVAPPTIYTYGILMNCCCHVRRPDLGLAYFGRLLRTGLNTNEVVASTLLKCLCCAKRADEAVNVLLHRTSVLGCVPNSFSYNIVLKSLCDDSRSQQALGLLQVMAKGDDCSPGVLSYRTLIHGFFKEGEVGKACNLFHEMMRQGVVPDVVTYSSIIDALCKAGAMDKAELFLRQMVDNSVRPDTVTYTSMIHGYSTLGRWKEATKMFREMTSRGLIPNIVTWNSFMASLCKHGKSKEAAEIFFSMAARGHKPDIISYTILLHGYANEGSFADMMNLFNSMVGDGIVANCQVFNILIDAYAKQGMMDEAMIILNKMRGQGLSPDVFTYSTLVSALCKMGRLADAMGKFSQMIGRGVQPNTVVYHSLVQGLCTHGVLVKAKELVNEMMNKGMLRPNIAFFNSIMDNLCNEGRVVDAHHIFDLVTDIGEKPDVITFTTLIDGYCLVGEMEKACGVLDAMVSAGIEPDVITYNTLVSGYCKSGRIDDGLNLFREMSHMEVKPTTVTYNIILDGLFHAGRTVAAKKMLHEMIGSGTPVSMHTYDIFIRGLCRNDCTNEAIALFQKLGALNVKFDIAILNSMINAMYKVQRREEANKLFAAISTTGLVPNASTYGIMIRNLLKEGSVEEAEDMFSSMEKSDCALSSRLINDIIRMLLEKGEIVKAGEYMSKVDGKSISLEASTSSLLLSLFSGKGKYREQIQLLPAKYQFFDGTI

SEQ ID NO: 285 - protein, 669 aa, Triticum aestivum; identical to SEQ ID NO: 282

SEQ ID NO: 286 - protein, 812 aa, Triticum aestivum; identical to SEQ ID NO: 284

SEQ ID NO: 287 - protein, 812 aa, Triticum aestivum; identical to SEQ ID NO: 284

SEQ ID NO: 288 - protein, 788 aa, Triticum aestivum
MPRFSTTTPMSPPRLRLRLGARHSSSTSHPSCIWDPHAAFAAATQRARSGKLTTEDAHHLFDELLRQGNPVQERPLTNFLAALARAPASASCSDGPALAVALFGRLSRGAGRGVAQPNVFTYGVLMDCCCRARFPDLALAFFGRLLRTGLKADQVVFSTLLKGLCHAKRSDEALDVLLHRMPELGCTPDVVVYNTVIHGFFREGQAGKACDLFHGMAQQGVMPDVVTYNSVIDALCKARAMDKAEYFLRQMVDDGVVPDNVTYSSLIHGYSSSGHWKEAVRVFKEMTSRRVTPDVHTYNMFMTFLCKHGRSKEAAGIFDTMAMKGLKPDNISYAIRLHGYATEGCLVDMINLFNSMERDCILPDCRIFSILINAYAKSGKLDKAMLIFNKMQKQGVSPNAVTYSTVIDAFCKKGQLDDAMIKFNQMIDTGVRQGTAVYGSLIQGFCTHGDLVKAKELLTEMMNKGIPPPDIKFFHSIMQNLCTEGRVIEARDVFGLMAHIGIRPNVCTFNILIGGYCLVGKMEDASKIFDDMMSYGLEPSNITYGILINGYCKNERIDDGLILFKEMLRKGVKPSTFNYNIILDGLFLAGRTVAAKEKFDEMVESGVSVCIDTYSIVLGGLCRNNCSGEAIMLFQKLSTMDVKFNIIIVNIMIDAFYRVQRNQEAKDLFAAVSANGLVANVFTYTIMMKNLIKEGSVEEADDLFLSMEKSGCTADSYMLNLIVRMLLEKGELVKAGNYMSKVDAKSYSLEAETVSLLISLFSGKGKYREHIGLLPTKYQFREEAATVE

SEQ ID NO: 289 - protein, 621 aa, Triticum aestivum
MIKRDVDKITEGCRLAHSHWYNLEKHSPVVLLPVEFATYTPAMPRFSSTTPMSPPRLRLRLRLCARHSSSTSHPSRIWDPHAAFAAATERARSGNLTPEDAHHLFDELLRQGNPVQERPLTNFLAALARAPASASCSDGPALAVALFGRLSRGAGRGVAQPNVFTYGVLMDCCCRARFPDLALAFFGRLLRTGLKADQVVFSTLLKGLCHAKRSDEALDVLLHRMPELGCTPYVVAYNTVIHGFFREGQAGKACDLFHGMAQQGVMPDVVTYNSVIDALCKARAMDKAEYFLRQMVDDGVVPDNVTYSSLIHGYSSSGHWKEAVRVFKEMTSRRVTPDVHTYNMFMTFLCKHGRSKEAAGIFDTMAMKGLKPDNISYAIRLHGYATEGCLVDMINLFNSMERDCILPDCRIFSILINAYAKSGKLDKAMLIFNKMQKQGVSPNAVTYSTVIDAFCKKGQLDDAMIKFNQMIDTGVRQGTAVYGSLIQGFCTHGDLVKAKELLTEMMNKGIPPPDIKFFHSIMQNLCTEGRVIEARDVLGLMAHIGIRPNVCTFNILIGGYCLVGKMEDASKIFDDMMSYGLEPSNITYGILINGYCKNERIDDGLILFKEMLRKGVKPSKF

SEQ ID NO: 290 - protein, 792 aa, Triticum aestivum
MPRFSSSTPMSPPRLRLRLRLRLCARHSSSTSHPSRIWDPHAAFAAATQRARSGKLTTEDAHHLFDELLRQGNPVQERPLTNFLAALARAPASASCSDGPALAVALFGRLSRGAGRGVAQPNVFTYGVLMDCCCRARFPDLALAFLGRLLRTGLKADQVVFSTLLKGLCHAKRSDEALDVLLHRMPEQGCTPYVVAYNTVIHGFFREGQAGKACDLFHGMAQQGVMPDVVTYNSVIDALCKARAMDKAEYFLRQMVDDGVVPDNVTYSSLIHGYSSSGHWKEAVRVFKEMTSRRVTPDVHTYNMFMTFLCKHGRSKEAAGIFDTMAMKGLKPDNISYAIRLHGYATEGCLVDMINLFNSMERDCILPDCRIFSILINAYAKSGKLDKAMLIFNKMQKQGVSPNAVTYSTVIDAFCKKGQLDDAMIKFNQMIDTGVRQGTAVYGSLIQGFCTHGDLVKAKELLTEMMNKGIPPPDIKFFHSIMQNLCTEGRVIEARDVLGLMAHIGIRPNVCTFNILIGGYCLVGKMEDASKIFDDMMSYGLEPSNITYGILINGYCKNERIDDGLILFKEMLRKGVKPSTFNYNIILDGLFLAGRTVAAKEKFDEMVESGVSVCIDTYSIVLGGLCRNNCSGEAIMLFQKLSTMDVKFNIIIVNIMIDAFYRVQRNQEAKDLFAAVSANGLVANVFTYTIMMKNLIKEGSVEEADDLFLSMEKSGCTADSYMLNLIVRMLLEKGELVKAGNYMSKVDAKSYSLEAETVSLLISLFSGKGKYREHIGLLPTKYQFREEAATVE

SEQ ID NO: 291 - protein, 784 aa, Triticum aestivum
MPRLSSTTPMSPLRLRARHSSSTSHPSRIWDPHTAFATATERARSGNLTPEDAHHLFDELLRQANPVQERPLNNLLAALARAPASAACSDGPALAVNLFSRISEGARRRVAHPTACTYGILMDCCCRANRQDLALAFFARLLRTGLKAGVIEVNTLLKGLCRAKRADEALDILLHRMPELGCTPNVVAYNTVIHGFFREGQVGKACNLFHEMRQQGVTPDVVTYNSVIDALCKAKAMDKAEYFLGQMVDDGVVSDNVTYNSLIHGYSSSGHWKEAVRVFKEMTSRRVTPDLHTYNMFMTFLCNHGRSKEAAGIFDSMAMKGLKPDNVSYAIRLHGYATEGCLVDMINLFNSMERDCILPDCRIFSILIYAYAKSGKLDKAMLIFNEMQKQGVSPNAVTYSTVIDAFCKKGQLDDAMIKFNQMIDTGVRQGTAVYRSLIQGFCTHGDLVKAKELLTEMMNKGIPPPDIKFFHSIMQNLCTEGRVIEARDILGLIAHIGMRPNVCTFNILIGGYCLVRKMADASKVFDDMVSYGLEPCNFTYGILINGYCKNRRIDDGLILFKEMLHKGLKPTTVNYNVILDGLFLAGQTVAAKEKFDEMVESGVSVCIDTYSIVLGGLCRNSCSSEAITLFRKLSAMNVKFDIKIVNIIIGAFYRVKRNQEAKDLFAAIPANGLVPNAVTYTIMMTNLIKEGSVEEADNLFLSMEKSGSTANSWMLNHIIRRLLERGEIVKAGNYMSKVDVKSYSLEAKTVSLLISLFSREGEYRDHIKLLPIKYQFLEKPATVE

SEQ ID NO: 292 - protein, 784 aa, Triticum aestivum; identical to SEQ ID NO: 291

SEQ ID NO: 293 - protein, 788 aa, Triticum aestivum
MPRFSSTTSMSSLRLRLHARHSSSASQPSHSQGWDPHAAFAAATERARSGSLTPVDAHHLFDELLRQTNPVQEQPLNNLLAALARAPASNACRDGPALAVALFSRISQGARLRVAQPTACTYGILMDCCCRAHRLDLAFAFFGRLLRTGLKAGVIQLCTLLKGLCRAKRADEAMDVLLHRMPELGCTPNVVAYTTVIHGFLKEGQVGKACNLFHGMAQQGVAPNVVTYNSVIDALCKARAMGKAEMVLGQMVVNGVGPSNVTYNTLIHGYSSSGHQKEAVRVLKEMRSQGIIPDVFTCSSLMASLCNNGKSKEAEEILHSMVMKGLKPDIVSYSTLLHGYATEGCLVGMTNLFNSMTRYGIRPNSHAFNILINVCAKSGMMDEAMLIFKEMQKRGVSPNLVTYSTVIHAFCKMGSLDIAMDKFNQMVDIGVRPDAIVYRSLIHGFCTHGDLVKPKELVTEMRNKGMRPPDIKFFHSIMQNLCTEGRVIEARDILDLIVRIGMRPDVFIFNILIGGYCLVRKMADASKIFDDMVSYGLEPSNITYGILINGYCKNRRIDEGLILFKEMLCKGLKPTTFNYNVILDGLFLAGRTVAAKEKFDEMVESGVSVCIDTYSIFLAGLCRNNCFSEVIMLFQKLSAMNMKFNIRIVNIMIDAFYKVRRNHEAKDLFAAIPSNGLVANVVTYSIMMTNLIKEGSVEEADTLFLSMEKSGCTANSWMLNHIIRRLLERGEIVKAGNYMSKVDAKSYSLEAKTVLLLISLFSGKGKYREHIKLLPMKYQFLEEPDTVE

SEQ ID NO: 294 - protein, 788 aa, Triticum aestivum
MPRFSSTTSMSSLRLRLHARHSSSASQPSHSQGWDPHAAFAAATERARSGSLTPVDAHHLFDELLRQTNPVQEQPLNNLLAALARAPASNACRDGPALAVALFSRISQGARLRVAQPTACTYGILMDCCCRAHRLDLAFAFFGRLLRTGLKAGVIQLCTLLKGLCRAKRADEAMDVLLHRMPELGCTPNVVAYTTVIHGFLKEGQVGKACNLFHGMAQQGVAPNVVTYNSVIDALCKARAMGKAEMVLGQMVVNGVGPSNVTYNTLIHGYSSSGHQKEAVRVLKEMRSQGIIPDVFTCSSLMASLCNNGKSKEAEEILHSMVMKGLKPDIVSYSTLLHGYATEGCLVGMTNLFNSMTRYGIRPNSHAFNILINVCAKSGMMDEAMLIFKEMQKRGVSPNLVTYSTVIHAFCKMGSLDIAMDKFNQMVDIGVRPDAIVYRSLIHGFCTHGDLVKPKELVTEMRNKGMRPPDIKFFHSIMQNLCTEGRVIEARDILDLIVRIGMRPDVFIFNILIGGYCLVRKMADASKIFDDLVSYGLEPSNITYGILINGYCKNRRIDEGLILFKEMLCKGLKPTTFNYNVILDGLFLAGRTVAAKEKFDEMVESGVSVCIDTYSIFLAGLCRNNCFSEVIMLFQKLSAMNMKFNIRIVNIMIDAFYKVRRNHEAKDLFAAIPSNGLVANVVTYSIMMTNLIKEGSVEEADTLFLSMEKSGCTANSWMLNHIIRRLLERGEIVKAGNYMSKVDAKSYSLEAKTVLLLISLFSGKGKYREHIKLLPMKYQFLEEPDTVE

SEQ ID NO: 295 - protein, 790 aa, Triticum aestivum
MPRFSSTTPMASLRLRLRLHARNYSSASQPSHGQGWDPHAAFAAATERARSGSLTPADAHHLFDELLRQANPVQERPLNNLLAAIARAPASNACRNGPALAVALFSRISQGARLWVVQPTACTYGILMDCCCRAHRLDLAFAFFGRLLRTGLKAGVIQLCTLLKGLCRAERADEAMDVLLHRMPELGCTPNVVAYTTVIHGFLKEGQVGKACNLFHGMAQQGVAPNVVTYNSFIDALCKARAMGKAEMVLGQMVVNGVGPSNVTYNTLIHGYSSSGHQKEAVRVLKEMRSQGIIPDVFTCSSLMASLCNNGKSKEAEEILHSMVMKGLKPDIVSYSTLLHGYATEGCLVGMTNLFNSMTRYGIRPNSHAFNILINVCAKSGMMDEAMLIFKEMQKRGVSPNLVTYSTVIHAFCKMGSLDIAMDKFNQMVDIGVRPDAIVYRSLIHGFCTHGDLVKPKELVTEMRNKGMRPPDIKFFHSIMQNLCTEGRVIEARDILDLIVRIGMRPDVFIFNILIGGYCLVRKMADASKIFDDMVSYGLEPSNITYGILINGYCKNRRIDEGLILFKEMLCKGLKPTTFNYNVILDGLFLAGRTVAAKEKFDEMVESGVSVCIDTYSIFLAGLCRNNCFSEVIMLFQKLSAMNMKFNIRIVNIMIDAFYKVRRNHEAKDLFAAIPSNGLVANVVTYSIMMTNLIKEGSVEEADTLFLSMEKSGCTANSWMLNHIIRRLLERGEIVKAGNYMSKVDAKSYSLEAKTVLLLISLFSGKGKYREHIKLLPMKYQFLEEPDTVE

SEQ ID NO: 296 - protein, 815 aa, Triticum aestivum
MSTSSSTCSLVQLGKALHSSCSRFHHAMPRLSSTTPMSPPHLRLRLGARHSSSTSHLSRIWDPHAAFAAATERVRSGSLTPADAHHLFDELLRQTNPVQEQPLNNLLAALARAPASNACRDGPALAVALFSRISQGARLWVVQPTACTYGILMDCCCRAHRLDLAFAFFGRLLRTGLKAGVIQLCTLLKGLCRAERADEAMDVLLHRMPELGCTPNVVAYTTVIHGFLKEGQVGKACNLFHGMAQQGVAPNVVTYNSVIDALCKARAMGKAEMVLGQMVVNGVGPSNVTYNTLIHGYSSSGHQKEAVRVLKEMRSQGIIPDVFTCSSLMASLCNNGKSKEAEEILHSMVMKGLKPDIVSYSTLLHGYATEGCLVGMTNLFNSMTRYGIRPNSHAFNILINVCAKSGMMDEAMLIFKEMQKRGVSPNLVTYSTVIHAFCKMGSLDIAMDKFNQMVDIGVRPDAIVYRSLIHGFCTHGDLVKPKELVTEMRNKGMRPPDIKFFHSIMQNLCTEGRVIEARDILDLIVRIGMRPDVFIFNILIGGYCLVRKMADASKIFDDMVSYGLEPSNITYGILINGYCKNRRIDEGLILFKEMLCKGLKPTTFNYNVILDGLFLAGRTVAAKDKFDEMVESGVSVCIDTYSIFLAGLCRNNCFSEVIMLFQKLSAMNMKFNIRIVNIMIDAFYKVRRNQEAKDLFAAIPSNGLVANVVTYSIMMTNLIKEGSVEEADTLFLSMEKSGCTANSWMLNHIIRRLLERGEIVKAGNYMSKVDAKSYSLEAKTVLLLISLFSGKGKYREHIKLLPMKYQFLEEPDTVE

SEQ ID NO: 297 - protein, 792 aa, Triticum aestivum
MPRFSSTTPMSPLRLRLRLRLRLGARHSSSTSHSSRSWDPHSAFAAAAERARSGNLTPEDAHHLFDELLRQGNPIQDRPLNKLLSALARAPASATCRNGPALAVALFSRISQGARRRVAEPTACTYGILMDCCCRAHRLDLVFAFFGRLLRTGLKAGVIQVCTLLKGLCRAKRADEALDVLLHRMPELGCTPNVVAYTTVIHGFFKEGQVGKACNLFHGMAQQGVAPNLVTYNSVIDALCKAKAMDKAEYFLGQMVDDGVVPDNVTYNSLIHGYSSSGHWKEAVRVFKEMTSRRVTADVHTYNMFMTFLCKHGRSKEAAGIFDTMAMKGLKPDNVSYAILLHGYATEGCLVDMINLFNSMERDCILPDCRIFNILINAYAKSGKLDKAMLIFNEMQKQGVSPNAVTYSTVIDAFCKKGQLDDAMIKFNQMIDTGVRQGTAIYGSLIQGFCTHGDLVKAKELATEMMNKGIPPPDIKFFHSIMQNLCTEGRVIEARDVLGLIAHIGMRPNVCTFNILIGGYCLVGKMEDASKIFDDMMSYGLEPSNITYGILINGYCKNERINDGLILFKEMLRKGLKPTTFNYNVILDGLFLAGRTVAAKEKFDEMVEFGVSVCIDTYSIVLGGLCRNNCSGEAITLFQKLSTIDVKFNITIVNIMIDAFYRVQRNQEAKDLFAAVSANGLVANVFTYTIMMKNLIKEGSVEEADDLFLSMEKSGCTADSYMLNLIVRMLLGKGEIVKAGNYISKIDAKSYSLEAKTVSLLISLFSGKGKYREHIGLLPAKYRFREEAATVV

SEQ ID NO: 298 - protein, 268 aa, Triticum aestivum
MPRFSAATPMSPLRLRLRLRARHSSSTSHSSRSWDPHSAFAAAAERARSGNLTPEDAHHLFDELLRQGNPVQDRPLNKLLSALARAPASATCRNGPALAVALFSRISQGARRRVAEPTACTYGILMDCCCRAHRLDLVFAFFGRLLRTGLKAGVIQVCTLLKGLCRAKRADEALDVLLHRMPELGCTPNVVAYTTVIHGFFKEGQVGKACNLFHGMAQQGVAPNLVTYNSVIDALCKAKAMDKAEYFLGQMVDDGVVPDNVTYNSLIH

SEQ ID NO: 299 - protein, 792 aa, Triticum aestivum; identical to SEQ ID NO: 297

SEQ ID NO: 300 - protein, 790 aa, Triticum aestivum
MPRFSSTTPMSPLRLRLRLRLGARHSSSTSHSSRSWDPHSAFAATAERARSGNLTPEDAHHLFDELLRQGNPIQDRPLNKLLSALARAPASATCRNGPALAVALFSRISQGARRRVAEPTACTYGILMDCCCRAHRLDLVFAFFGRLLRTGLKAGVIQVCTLLKGLCRAKRADEALDVLLHRMPELGCTPNVVAYTTVIHGFFKEGQVGKACNLFHGMAQQGVAPNLVTYNSVIDALCKAKAMDKAEYFLGQMVDDGVVPDNVTYNSLIHGYSSSGHWKEAVRVFKEMTSRRVTADVHTYNMFMTFLCKHGRSKEAAGIFDTMAMKGLKPDNVSYAILLHGYATEGCLVDMINLFNSMERDCILPDCRIFNILINAYAKSGKLDKAMLIFNEMQKQGVSPNAVTYSTVIDAFCKKGQLDDAMIKFNQMIDTGVRQGTAIYGSLIQGFCTHGDLVKAKELATEMMNKGIPPPDIKFFHSIMQNLCTEGRVIEARDVLGLIAHIGMRPNVCTFNILIGGYCLVGKMEDASKIFDDMMSYGLEPSNITYGILINGYCKNERINDGLILFKEMLRKGLKPTTFNYNVILDGLFLAGRTVAAKEKFDEMVEFGVSVCIDTYSIVLGGLCRNNCSGEAITLFQKLSTIDVKFNITIVNIMIDAFYRVQRNQEAKDLFAAVSANGLVANVFTYTIMMKNLIKEGSVEEADDLFLSMEKSGCTADSYMLNLIVRMLLGKGEIVKAGNYISKIDAKSYSLEAKTVSLLISLFSGKGKYREHIGLLPAKYRFREEAATVV

SEQ ID NO: 301 - protein, 773 aa, Triticum aestivum
MSNTRLSSTFTSSLKAPSRKPRAPRLAALAAATERVRAGTLTRQDARQLFDELLSQAATVPVRTLNNFLAALSRAPPSAACSDGPGLAIALFNHMSQGAGARVVSPTLCTYSILMDCCCRARRPDLVVSFFGRLLRLGLRLNVISFNNLLKGLCQAKRTNEAVDLLLHRTPELDCVPNVFSYSIVINGCFKQGEVDKACNLFNQMPQLGVQPDVVIYNSIIDALSKSGAMDKAEVVLRQMVDQGIGPNVMTYTSLIHGYSASGQWKAAVRVFKEMVSVGVQPNAVALNSFMDSLCKHRRTKEARDIFDSMAAKGQKPDIFSYSTMLNGYVKEGCFDDMTGLFNLMLQNGVVRNHHIFNILINAYAKRGLMDEAMHMFEVMRQQGVNPDVFSYQIVMDSLCKMGRMDAALDKFNQMVNQGVSPNIVVYRCLVLGSCSHGDFVKAKELISEAVNRGLCSNSVFFYPVINNLSKEGKVKEAQDMFDFIVGIGQRPDVIMYHSLMDGYCLVGKVEEALRVLDAMKFAGLQPTAVTYAILLNGYCKSGRIAAGLSLFMEMSLSGVKPTTIMYNIILDGLFRSGRTVSAKEKFRTMSESGIPVGIDTYNIVLSGLCKNNCAGEAIELFKKLRAMNVKIDVKTLTIMISAMFKSRRIEEAKELFATISAIGLVPSVVTYSVMMTNFIKEGSLAEADDMFLAMEKASCAPNSILLNQVVRALLEKGVVVKAATYLAKLDAKQLSLEASTVSLILSLFSRKGKLREHVKLLPVKYQPPEMLD

SEQ ID NO: 302 - protein, 824 aa, Triticum aestivum
MSRLRHSTSTAPVPHLRLLRCRSSSISTLPPSRSSSPHAAFAAATERVSAGTLSPEDAHRLFDELLRQATPVPARSLNGFLTALSRAPDTGACRDGPALALSLFNRTRREAAGSRVVSSTIFTYGILMNCCCRTRRPELGLAFFGRVLRMGLKTNVVVATTVLQCLCGAKRTDEAVDILLHRMSELGCVPDDFSYNIVLKSLCDDSRSQRALDLLRMWENERGVCSPNVYTYNTVIHGFFKEGEVSKACNLFHEMAQKGVPPNVVTYSLTIDALCKARAMDKAQLFLRQMIHKGVRPNIVTYNVMIHGYSTLGQWKEAGKMFREMTGQGLIPDIVTWTSFMASLCKHGRTKEAAEFFDSMTAKGHKPDLVMYHVLLHGYATEGCFADMINLFNSMATKGIVPDRQVFNILIDAHAKHGMMDEAMHIFTGMQGQGVCPDVWTYSTLISALCRMGRLADAMDNFSQMIGKGVQPNTVVYHSLIQGFSTHGDLRKANELVYEMTNKGIPCPNIAFFSSIMDSLCKEGRVMDAHDIFHLVTDIGLKPNIITFNTLIDGHCLVGEMEKAFGVLDSMVSAGIEADVFTYNTLAYGYCRCGRIDDGLILFREMLQNKPKPTTITYNIILDGLFRAGRTFAAKKMFVEMIETGITVSISTYSIILGGLCRNNCSDEAITLFQKLGAMNVKFDIKILNTMINAMFKVRRREEANGLFAAISASGMVPNTSTYSVMIGNLLKEGSVEEAENMFSLMEKSGCAPDSRLINNIIRILLENGDIVKAGNYMSKVDGKSISLEASTTSLLMCLFSSKGKYREQISLLPVNYQFFNGVG

SEQ ID NO: 303 - protein, 221 aa, Triticum aestivum
MPRFSSTTPLSPLRRRLHHSSSTSHSSRSWEPHAAFAAATERARSGNLTLEDAHHLFDELLRQGNPVQDRPLNKLLSALARAPASAACRNGPALAVALFSRISQGARRRVAEPTVCTYGILMDCCCRAHRLDLALAFFGHLLKTGLEVDQVVFNTLLKGLCHAKRADEALDVLLHRMTELGCTPNVVAYNTIIHGFFKEGQVSKACNLFHEMAQQAFRLMW

SEQ ID NO: 304 - protein, 548 aa, Triticum aestivum
MDKAEVVLRQMIDRSVGPNSVTYSSLIHGYSSSGHWKEAVRVFKEMTSRRVTPNVHTYNMFITFLCKHGRSKEAAGIFDSMAMKGLKPDDVSYAILLHGYATEGSLVDMINLFNSMERDCILPDCRIFSILINAYAKSGKVDKVMLIFKKMQKQGVSPDAVTYSTLIDAFCKKGRLDDAMIKFNQMVDTGVRQGTAVYGSLIQGFCTHGDLVKGKELVTEMMNKGIPPPDIKFFHSIMQNLCTEGRVIEARDILGLIAHIGMRPNVCTFNILIGGYCLVRKMEGASKIFHDMMSYGLEPSNITYGILINGYCKNLRIDDGLILFKEMLRKGLKPTTLNYNIILDGLFLAGRTAAAKERFHEMVESGAHVCIDTYCIVLGGLCRNNCSSEAITLFGKLSAMNVRFDITIVNIIIGAFYRVERNQEAKDLFAAMPANCLVPNAVTYTIMMTNLIKEGSVEEADNLFLSMEKSGCTANSCLLNHVIRRLLEKGEIVKAGNYMYKVDAKNYSLEAKTVSLLMSLFTRKGKYREHIKLLPAKYQFLEEAATVE

SEQ ID NO: 305 - protein, 784 aa, Triticum aestivum
MPRFSSTTPLSPLRRRLRHSSSTSHSSRSWEPHAAFAAATERARSGNLTLEDAHHLFDELLRQGNPVQDRPLNKLLSALARAPASAACRNGPALAVALFSRISQGARRRVAEPTVCTYGILMDCCCRAHRLDLALAFFGHLLKTGLEVDQVVFNTLLKGLCHAKRADEALDVLLHRMTELGCTPNVVAYNTIIHGFFKEGQVSKACNLFHEMAQQGVPPNVVTYNSVIDALCKARAMDKAEVVLRQMIDRSVGPNSVTYSSLIHGYSSSGHWKEAVRVFKEMTSRRVTPNVHTYNMFITFLCKHGRSKEAAGIFDSMAMKGLKPDDVSYAILLHGYATEGSLVDMINLFNSMERDCILPDCRIFSILINAYAKSGKVDKVMLIFKKMQKQGVSPDAVTYSTLIDAFCKKGRLDDAMIKFNQMVDTGVRQGTAVYGSLIQGFCTHGDLVKGKELVTEMMNKGIPPPDIKFFHSIMQNLCTEGRVIEARDILGLIAHIGMRPNVCTFNILIGGYCLVRKMEGASKIFHDMMSYGLEPSNITYGILINGYCKNLRIDDGLILFKEMLRKGLKPTTLNYNIILDGLFLAGRTAAAKERFHEMVESGAHVCIDTYCIVLGGLCRNNCSSEAITLFGKLSAMNVRFDITIVNIIIGAFYRVERNQEAKDLFAAMPANCLVPNAVTYTIMMTNLIKEGSVEEADNLFLSMEKSGCTANSCLLNHVIRRLLEKGEIVKAGNYMYKVDAKNYSLEAKTVSLLMSLFTRKGKYREHIKLLPAKYQFLEEAATVE

SEQ ID NO: 306 - protein, 778 aa, Triticum aestivum
MPTGRLSSIFTSNATSSFRAPSPQPRAPLAALAAATERVCDGTLRPEEAHHLFDELLSQAAAVPERGLNNFLAALAHAPPSSTCSDGPGLAIALFNRMSRGAGARVVSPTLCTYSILMDCCCRAGRPDLVVAFFGRLLRLGLCLNVISFNNLLKGLCQVKRTNEAVDLLLHRTPELDCVPNVFSYSIVINGCFKQGEVDKACNLFHQMIQLGVQPNLVIYNSIIDALSKSGAMDKAEVVLRQMVDQGIEPNIRTYTSLIHGYSASGQWKAAARVFKEMVSVGVLPDAVAWNSFMDSLCKHRRTKDARVIFDSMAAKGQKPNIVSYSIMLNGYAKEGYFDDMTGLFNLMLQNGIVPNHHVFNILINAYSKRGLMDEAMHMFEVMRQQGVNPDVFGYQIVMDSLCKMGRVDAALDKFNQMVNQGVSPNKAVYQCLVLGSCSNGDFVKAKELISEAVNRGLCSNSVFFYPVINNLSKEGKVKDAQDMFDFIVGIGRPPDVIMYNSLMDGYCLVGKVEEALRVLDAMKSAGLQPDAFTYGILLNGYCKIGRIADGLSLFREMSLSGVKPTAIMYNIILDGLFRSGRAVSAKEKFCTMSESGIPVGIGTYNIVLHGLCRNNCTDEAIELFNKLRAMKLKINVITINTMISAMFKTRRIEEAKDLFATISAIGLVPSVVTYSVMMTNFIKEGLLAEADDMFLAMEKAGCAPDSRLLNHVVRVLLENGAVVKAATYLAKLDANHLSLEVSTISLIVSLFSGEGKLREHVELLPVKYQPPESSADN

SEQ ID NO: 307 - protein, 778 aa, Triticum aestivum; identical to SEQ ID NO: 306

SEQ ID NO: 308 - protein, 778 aa, Triticum aestivum; identical to SEQ ID NO: 306

SEQ ID NO: 309 - protein, 778 aa, Triticum aestivum; identical to SEQ ID NO: 306

SEQ ID NO: 310 - protein, 778 aa, Triticum aestivum; identical to SEQ ID NO: 306

SEQ ID NO: 311 - protein, 778 aa, Triticum aestivum; identical to SEQ ID NO: 306

SEQ ID NO: 312 - protein, 770 aa, Triticum aestivum
MPTARLSSISTSSFRAPSRAPLAALAAATERVRAGTLSREDAHHLFDELQGQAAAVPVRTLNNFLAALARAPPSSACSDGPGLAIALFNRMSRGAGARVVSPTLCTYSILMDCCCRAGRPDLVVAFFCRLLRLGLRFEEVISFNNLLKGLCQAKRSNEALDLLLHRMPELDCAPDVFSFNIVINGCLKEGEVDKACNLFHEMPQLGVQPDVVTYNSIIDALSKSGAMDKAEVLLRQMVDQGIEPNIRTYSCLIHGYSTFGQWKEALRVFKEMASLGVVPDVVTLSSLIDSLCKHRRTKQAREIFDSMAAKGLKPDIVSYSTMLNGYVKEGSFEDMTDLFNSMVRNGIVPNHHIFNILINAYAKRGLMDEAMHMFEVMRQQGVNPNVIDYLVIMDSLCKMGRMDAALEKFNQMVNQGVSPNKAVYQCLVLGSCSHGHFVKAKELISEAINRGLFSNSVFFYPVINDLCKEGKVKEAHDMFDFIVGIGQRPDVIMYNSLMDGYCLVGKVEEALRLLDAMKSAGLQPTGVTYAILLNGYCKIGRIADGLSLFREMSLSGVKPTTIMYNIILDGLFCSGRTVSAKEEFDTMSESGIPVNVRTYNIVLSGLCRNNCTGEAIELFKKLRAMNVKINVITLNTMISAMFKTRRIEEAKDLFATISAIGLVPSVVTYSVMMTNFIKEGLLAEADDMFLAMEKAGCAPNSSLLNQVVRVLLEKGAAVQAATYLAKLDAKQLSLEASTVSLILSLFSRKGKLREHVKLLPVKYQPPEMLD

SEQ ID NO: 313 - protein, 681 aa, Triticum aestivum
MSRGAGARVVSPTLCTYSILMDCCCRAGRPDLVVAFFGRLIRLGLRLEIISFSNLLKGLCQAKRSNEALDMLLHRMPELDCAPDVFSFNIVINGCFKEGEVDKACNLFHEMPQLGVQPDVVTYNSIIDALSKSRAMDKAEVVLRQMVDQGIEPNIRTYTSLIHGYSTSGQWKAAVRIFKEMASAGVRPNSVTLNSFIDSLCKHRKTKEARDIFDSMAAKGHKPDIFSYSTMLNGYAKEGCFDDMTDLFNSMVRNGIVPDHHVFNILINAYAKRGLMDKAMHMFEVMRQQGVNPNVVDYLVVMDSLCKMGKMAAAMDIFNQMVNQGVSPNIVVYRCMVLGSCSHGDFVKAKELISEAVNKGLCSNSVFFYPVINNLCKEGKVMEAQDMFDFDFIVGIGQRPDVIMYTSLMDGYCLVGKVEKALRVLDAMKSAGLQPTAVTYGALLNGYCKIGKIADGLSLFREMSLSGVKPTTIMYNIILDGLFCSGRPVSAKEEFDTMIESGIPVGVDTYNIVLSGLCKNNCTDEAMDLFKKLRATNMKIDVITLNIMISAMFKTRRIEEAKDLFATISAIGLVPCVVTYNLMMTNFIKEGLLPEADDMFLAMEKANCAPNSRLLNHVVRLLLEKGAVVKAATYLAKLDANHLSLEVSTISLIVSLFSGEGKLREHVELLPVKYQPPEMSI

SEQ ID NO: 314 - protein, 778 aa, Triticum aestivum
  SITE 433: note = misc_feature - Xaa can be any naturally occurring amino acid
MPTGRLSSIFTSNATSSFRAPSPQPRPPLAALAAATERVRAGTLSREEAHHLFDELQGQAAAVPERGLNNFLAALARAPPSSACGDGPALAVALFNRMSRGAGARVVSPTLCTYSILMDCCCRAGRPDLVVAFFGRLIRLGLRLEIISFSNLLKGLCQAKRSNEALDMLLHRMPELDCAPDVFSFNIVINGCFKEGEVDKACNLFHEMPQLGVQPDVVTYNSIIDALSKSRAMDKAEVVLRQMVDQGIEPNIRTYTSLIHGYSTSGQWKAAVRIFKEMASAGVRPNSVTLNSFIDSLCKHRKTKEARDIFDSMAAKGHKPDIFSYSTMLNGYAKEGCFDDMTDLFNSMVRNGIVPDHHVFNILINAYAKRGLMDKAMHMFEVMRQQGVNPNVVDYLVVMDSLCKMGKMAAAMDIFNQMVNQGVSPNIVVYRCXVLGSCSHGDFVKAKELISEAVNKGLCSNSVFFYPVINNLCKEGKVMEAQDMFDFDFIVGIGQRPDVIMYTSLMDGYCLVGKVEKALRVLDAMKSAGLQPTAVTYGALLNGYCKIGKIADGLSLFREMSLSGVKPTTIMYNIILDGLFCSGRPVSAKEEFDTMIESGIPVGVDTYNIVLSGLCKNNCTDEAMDLFKKLRATNMKIDVITLNIMISAMFKTRRIEEAKDLFATISAIGLVPCVVTYNLMMTNFIKEGLLPEADDMFLAMEKANCAPNSRLLNHVVRLLLEKGAVVKAATYLAKLDANHLSLEVSTISLIVSLFSGEGKLREHVELLPVKYQPPEMSI

SEQ ID NO: 315 - protein, 222 aa, Triticum aestivum
MLHKGLKPTTFNYNVILDGLFLARQTVASKVKFHEMAESGVSVCIDTYSIVLGGLCRNNCIGEAITLFQKLSTMNVKFNIAIVNIMIGAFFRVRRNQEAKDLFAAVSANGLVANVFTYTVMMINLIEEGSLEEADTLFLSMKKSGCTANSCMLNHIIRRLLERGEIVKAGNYMSKVDAKSYSLEAKTVLLLISLFSGNGKYREHIKLLPMKYQFLEEAATVE

SEQ ID NO: 316 - protein, 328 aa, Triticum aestivum
MMKKGMLPPDIMFFSSIMQNLCTEGRVIEARDILDLIVCIGMRPDVFIFNILIGGYCLVRKMADASKIFDDMVSYGLEPCNITYGILINGYCKNGRIDDGLILFKEMLHKGLKPTTFNYNVILDGLFLARQTVASKVKFHEMAESGVSVCIDTYSIVLGGLCRNNCIGEAITLFQKLSTMNVKFNIAIVNIMIGAFFRVRRNQEAKDLFAAVSANGLVANVFTYTVMMINLIEEGSLEEADTLFLSMKKSGCTANSCMLNHIIRRLLERGEIVKAGNYMSKVDAKSYSLEAKTVLLLISLFSGNGKYREHIKLLPMKYQFLEEAATVE

SEQ ID NO: 317 - protein, 487 aa, Triticum aestivum
  SITE 16: note = misc_feature - Xaa can be any naturally occurring amino acid
  REGION 18..25: note = misc_feature - Xaa can be any naturally occurring amino acid
  REGION 27..28: note = misc_feature - Xaa can be any naturally occurring amino acid
MRIVLKSAEKDFVLSXLXXXXXXXXCXXHTKAMPRFSSSTPMSPPRLRLLLLLRLGARHSSSTSHPSRIWDPHAAFAAATQRARSGTLTTEDAHHLFEELLRQGNPVQERPLTNFLAALARAPASPFCSDGPALAVALFSRLSRGAGRRVAQPNVFTYGVLMDCCCRARRLDVAIAFFAHLLKTGLEAGQVVFGTLLKGLCHAKHSDEALDVVLHRMPELGCTPDVVAYTTVIHGFLKEGQVGKACNLFHGMAQQGVAPDVVTYSSVIDALCKARAMDKAEYFLREMVDNGVVPNNVTYNSLIHGYSSLGHQKEAVRVLKEMTRQGIIPDVFTCNSVMASLCKNGKSKEAAKMFDSMSMKGLKPNTVSYVILLHGYATEGCLVDMINLFNSMATDCILPNCHIFNILIYAYAKSGKLDKAMLIFKEMQKQGVSPDAVTYSTVIHAFCKKGRLDDAVIKFNQMIDTGVRPDASVYRSLIQGESKGICY

SEQ ID NO: 318 - protein, 328 aa, Triticum aestivum; identical to SEQ ID NO: 316

SEQ ID NO: 319 - protein, 792 aa, Triticum aestivum
MPRFSSSTPMSPPRLRLLLLLRLGARHSSSTSHPSRIWDPHAAFAAATQRARSGTLTTEDAHHLFEELLRQGNPVQERPLTNFLAALARAPASPFCSDGPALAVALFSRLSRGAGRRVAQPNVFTYGVLMDCCCRARRLDLAIAFFAHLLKTGLEAGQVVFGTLLKGLCHAKHSDEALDVVLHRMPELGCTPDVVAYTTVIHGFLKEGQVGKACNLFHGMAQQGVAPDVVTYSSVIDALCKARAIDKAEYFLREMVDNGVVPNNVTYNSLIHGYSSLGHQKEAVRVLKEMTRQGIIPDVFTCNSVMASLCKNGKSKEAAKMFDSMSMKGLKPNTVSYVILLHGYATEGCLVDMINLFNSMATDCILPNCHIFNILIYAYAKSGKLDKAMLIFKEMQKQGVSPDAVTYSTVIHAFCKKGRLDDAVIKFNQMIDTGVRPDASVYRSLIQGFCTHGDLVKAKEYVTEMMKKGMLPPDIMFFSSIMQNLCTEGRVIEARDILDLIVCIGMRPDVFIFNILIGGYCLVRKMADASKIFDDMVSYGLEPCNITYGILINGYCKNGRIDDGLILFKEMLHKGLKPTTFNYNVILDGLFLARQTVAAKVKFHEMAESGVSVCIDTYSIVLGGLCRNNCIGEAITLFQKLSTMNVKFNIAIVNIMIGAFFRVRRNQEAKDLFAAVSANGLVANVFTYTVMMINLIEEGSLEEADTLFLSMKKSGCTANSCMLNHIIRRLLERGEIVKAGNYMSKVDAKSYSLEAKTVLLLISLFSGNGKYREHIKLLPMKYQFLEEAATVE

SEQ ID NO: 320 - protein, 455 aa, Triticum aestivum
  SITE 11: note = misc_feature - Xaa can be any naturally occurring amino acid
MPRFSSSTPMXPPRLRLLLLLRLGARHSSSTSHPSRIWDPHAAFAAATQRARSGTLTTEDAHHLFEELLRQGNPVQERPLTNFLAALARAPASPFCSDGPALAVALFSRLSRGAGRRVAQPNVFTYGVLMDCCCRARRLDLAIAFFAHLLKTGLEAGQVVFGTLLKGLCHAKHSDEALDVVLHRMPELGCTPDVVAYTTVIHGFLKEGQVGKACNLFHGMAQQGVAPDVVTYSSVIDALCKARAIDKAEYFLREMVDNGVVPNNVTYNSLIHGYSSLGHQKEAVRVLKEMTRQGIIPDVFTCNSVMASLCKNGKSKEAAKMFDSMSMKGLKPNTVSYVILLHGYATEGCLVDMINLFNSMATDCILPNCHIFNILIYAYAKSGKLDKAMLIFKEMQKQGVSPDAVTYSTVIHAFCKKGRLDDAVIKFNQMIDTGVRPDASVYRSLIQGESKGICY

SEQ ID NO: 321 - protein, 792 aa, Triticum aestivum
MPRFSSSTPMSPPRLRLLLLLRLGARHSSSTSHPSRIWDPHAAFAAATQRARSGTLTTEDAHHLFEELLRQGNPVQERPLTNFLAALARAPASPFCSDGPALAVALFSRLSRGAGRRVAQPNVFTYGVLMDCCCRARRLDVAIAFFAHLLKTGLEAGQVVFGTLLKGLCHAKHSDEALDVVLHRMPELGCTPDVVAYTTVIHGFLKEGQVGKACNLFHGMAQQGVAPDVVTYSSVIDALCKARAMDKAEYFLREMVDNGVVPNNVTYNSLIHGYSSLGHQKEAVRVLKEMTRQGIIPDVFTCNSVMASLCKNGKSKEAAKMFDSMSMKGLKPNTVSYVILLHGYATEGCLVDMINLFNSMATDCILPNCHIFNILIYAYAKSGKLDKAMLIFKEMQKQGVSPDAVTYSTVIHAFCKKGRLDDAVIKFNQMIDTGVRPDASVYRSLIQGFCTHGDLVKAKEYVTEMMKKGMLPPDIMFFSSIMQNLCTEGRVIEARDILDLIVCIGMRPDVFIFNILIGGYCLVRKMADASKIFDDMVSYGLEPCNITYGILINGYCKNGRIDDGLILFKEMLHKGLKPTTFNYNVILDGLFLARQTVAAKVKFHEMAESGVSVCIDTYSIVLGGLCRNNCIGEAITLFQKLSTMNVKFNIAIVNIMIGAFFRVRRNQEAKDLFAAVSANGLVANVFTYTVMMINLIEEGSLEEADTLFLSMKKSGCTANSCMLNHIIRRLLERGEIVKAGNYMSKVDAKSYSLEAKTVLLLISLFSGNGKYREHIKLLPMKYQFLEEAATVE

SEQ ID NO: 322 - protein, 181 aa, Triticum aestivum
MPTGRLSSIFTSNATSSFRAPSPQPRAPLAALAATTERVCAGTLRPEEAHHLFDELLSQAAAVPERGLNNFLAALARAPPSAACSDGPGLAITLFNRMSRGAGAQVVSPTLCTYSILMDCCCRAGRPDLVVAFFGRLLRSSPSTTSSRGSARSSVQMRLWTCCSTGHLNWTVCLMSSRTAS

SEQ ID NO: 323 - protein, 365 aa, Triticum aestivum
MPTGRLSSIFTSNATSSFRAPSPQPRAPLAALAATTERVCAGTLRPEEAHHLFDELLSQAAAVPERGLNNFLAALARAPPSAACSDGPGLAITLFNRMSRGAGAQVVSPTLCTYSILMDCCCRAGRPDLVVAFFGRLLRLGLHLNVISFNNLLKGLCQVKRTNEAVDLLLHRTPELDCVPNVFSYSIVINGCFKEGEVDKACNLFHEMPQLGVQPNVVIYTSIIDALSKCGAMDKAEVVLQQMVDQGIEPNIRTYTSLIHGYSASGQWKAAARVFKEMVSAGVLPNAVTLNSFMDSLCKHRRTKEKGNLVHVAPTCAGSREGSDHFGSIVRSLSLHFCKRLFPGLEPMTSWSQGSSFTTAPRLPS

SEQ ID NO: 324 - protein, 272 aa, Triticum aestivum
MDIELVGKVEEALRVLDAMKSAGLQPTAVTYAILLNGYCKIGRIADGLSLFREMSLSGVKPTTFMYNIILDGLFRSGRAVSAKEKFRTMSESGIPVGIVTYNIVLHGFCRNNCTDEAIELFKKLRGMNVKIDVITLTTMISAMFKTRRIEEAKDLFATISAIGLVPSVVTYSVMMTNFIKEGLLAEADDMFLAMEKAGCAPDSRLLNHVVRVLLENGAVVKAATYLAKLDAKQLSLEASTVSLILSLFSRKGKLREHVKLLPVKYQPPEMLD

SEQ ID NO: 325 - protein, 181 aa, Triticum aestivum; identical to SEQ ID NO: 322

SEQ ID NO: 326 - protein, 507 aa, Triticum aestivum
MPTGRLSSIFTSNATSSFRAPSPQPRAPLAALAATTERVCAGTLRPEEAHHLFDELLSQAAAVPERGLNNFLAALARAPPSAACSDGPGLAITLFNRMSRGAGAQVVSPTLCTYSILMDCCCRAGRPDLVVAFFGRLLRLGLRLNVISFNNLLKGLCQVKRTNEAVDLLLHRTPELDCVPNVFSYSIVINGCFKEGEVDKACNLFHEMPQLGVQPNVVIYTSIIDALSKCGAMDKAEVVLQQMVDQGIEPNIRTYTSLIHGYSASGQWKAAARVFKEMVSVGVLPNAVTLNSFMDSLCKHRRTKDARDIFDSMAAKGQKPDIFSYSIMLNGYAKEGYFEDMTDLFNLMVLNGIVPNHHIFNILINAYAKRGLMDEAMHMFEVMRQQGVNPNVVDYVVVMDSLCKMGRMDAALDKFTQLVNQGVSPNKAVYQCLVLGSCSHGHFVKAKELISEAINRGLFSNSVFFYPVINDLCKEGKVKEAQDMFDFILGIGRRPDVIMYNSLMDGY

SEQ ID NO: 327 - protein, 776 aa, Triticum aestivum
MPTGRLSSIFTSNATSSFRAPSPQPRAPLAALAATTERVCAGTLRPEEAHHLFDELLSQAAAVPERGLNNFLAALARAPPSAACSDGPGLAITLFNRMSRGAGAQVVSPTLCTYSILMDCCCRAGRPDLVVAFFGRLLRLGLRLNVISFNNLLKGLCQVKRTNEAVDLLLHRTPELDCVPNVFSYSIVINGCFKEGEVDKACNLFHEMPQLGVQPNVVIYTSIIDALSKCVAMDKAEVVLQQMVDQGIEPNIRTYTSLIHGYSASGQWKAAARVFKEMVSVGVLPNAVTLNSFMDSLCKHRRTKDARDIFDSMAAKGQKPDIFSYSIMLNGYAKEGYFEDMTDLFNLMVLNGIVPNHHIFNILINAYAKRGLMDEAMHMFEVMRQQGVNPNVVDYVVVMDSLCKMGRMDAALDKFTQMVNQGVSPNKAVYQCLVLGSCSHGHFVKAKELISEAINRGLFSNSVFFYPVINDLCKEGKVKEAQDMFDFILGIGRRPDMIMYNSLMDGYCLVGKVEEALRVLDAMKSAGLQPTAVTYAILLNGYCKIGRIADGLSLFREMSLSGVKPTTFMYNIILDGLFRSGRAVSAKEKFRTMSESGIPVGIVTYNIVLHGFCRNNCTDEAIELFKKLRGMNVKIDVITLTTMISAMFKTRRIEEAKDLFATISAIGLVPSVVTYSVMMTNFIKEGLLAEADDMFLAMEKAGCAPDSRLLNHVVRVLLENGAVVKAATYLAKLDAKQLSLEASTVSLILSLFSRKGKLREHVKLLPVKYQPPEMLD

SEQ ID NO: 328 - protein, 507 aa, Triticum aestivum
MPTGRLSSIFTSNATSSFRAPSPQPRAPLAALAATTERVCAGTLRPEEAHHLFDELLSQAAAVPERGLNNFLAALARAPPSAACSDGPGLAITLFNRMSRGAGAQVVSPTLCTYSILMDCCCRAGRPDLVVAFFGRLLRLGLRLNVISFNNLLKGLCQVKRTNEAVDLLLHRTPELDCVPNVFSYSIVINGCFKEGEVDKACNLFHEMPQLGVQPNVVIYTSIIDALSKCGAMDKAEVVLQQMVDQGIEPNIRTYTSLIHGYSASGQWKAAARVFKEMVSVGVLPNAVTLNSFMDSLCKHRRTKDARDIFDSMAAKGQKPDIFSYSIMLNGYAKEGYFEDMTDLFNLMVLNGIVPNHHIFNILINAYAKRGLMDEAMHMFEVMRQQGVNPNVVDYVVVMDSLCKMGRMDAALDKFTQMVNQGVSPNKAVYQCLVLGSCSHGHFVKAKELISEAINRGLFSNSVFFYPVINDLCKEGKVKEAQDMFDFILGIGRRPDVIMYNSLMDGY

SEQ ID NO: 329 - protein, 272 aa, Triticum aestivum
MDIELVGKVEEALRVLDAMKSAGLQPTAVTYAILLNGYCKIGRIADGLSLFREMSLSGVKPTTFMYNIILDGLFRSGRAVSAKEKFRTMSESGIPVGIVTYNIVLHGFCRNNCTDEAIELFKKLRGMNVKIDVITLTTMISAMFKTRRIEEAKDLFATISAIGLVPSVVTYSVMMTNFIKEGLLAEADDMFLAMEKAGCAPDSRLLNHVVRVLLENGAVVKAATYLAKLDAKQLSLEASTVSLILSLFSRKGKLREHVKLLPVKYQPPKMLD

SEQ ID NO: 330 - protein, 507 aa, Triticum aestivum; identical to SEQ ID NO: 326

SEQ ID NO: 331 - protein, 272 aa, Triticum aestivum
MDIELVGKVEEALRVLDAMKSAGLQPTAVTYAILLNGYCKIGRIADGLSLFREMSLSGVKPTTFMYNIILDGLFRSGRAVSAKEKFRTMSESGIPVGIVTYNIVLHGFCRNNCTDEAIELFKKLRGMNVKIDVITLTTMISAMFKTRRIEEAKDLFATISAIGLLPSVVTYSVMMTNFIKEGLLAEADDMFLAMEKAGCAPDSRLLNHVVRVLLENGAVVKAATYLAKLDAKQLSLEASTVSLILSLFSRKGKLREHVKLLPVKYQPPEMLD

SEQ ID NO: 332 - protein, 272 aa, Triticum aestivum; identical to SEQ ID NO: 324

SEQ ID NO: 333 - protein, 771 aa, Triticum aestivum
MPAARLSSISTSSFRAPSRAPLAALAAATERVRAGTLSQEDAHHLFDELLGQAAAVPERGLNNFLAALARAPPSAACRDGPGLAIALFNHMSRGAGARVVSPTLCTYSILMDCCCRAGRPDLVVAFFGRLIRLGLRLEVISFSNLLKGLCQAKRTNEAVDLLLHRTPELDCVPNVFSYNIVISSCFKEGEVDKACNLFHEMPQLGVQPNVVIYTSIIDALSKCGAMDKAEVVLQQMVDQGIEPDIRTYTSLIHGYSASGQWKAAVRVFKEMVSVGVLPNAVTLNSFMDSLCKHRRTKEAREIFDSMAAKGLKPNIVSYSTMLNGYVKEGSFEDMTDLFNSMVRNGIVPNHHIFNILINAYAKRGLMDEAMHMFEVMRQQGVNPDVFDYQIIMDSLCKMGRMDAALDKFNQMVNQGVSPNKAVYQCLVLGSCSHGDFVKAKELISEAVNRGLCSNSVFFYPVINDLCKEGKVKEAQDMFDFILGIGQRPDVIMYTSLMDGYCLVGKVEKALSVLDAMKSAGLQPDDVVYATLLNGYCKIGRIADGLSLFREMSLSGVKPTTIIYNIILDGLFCSGRTGSAKEKFHTMTESGIPVGVDTYNIVLSGLCRNNCTDEAIELFKKLRATNVKIDIMTLNIMISAMFKTRRIEEAKDLFATISAIGLVPSVVTYSLMMTNFIKEGLLADADDTFLVMEKAGCAPNSSLLNQVVRVLLEKGAFVKAATYLAKLDAKQLSVEASTISLIVSLFSGEGKPREHVELLPVKYQPPQSSADN

SEQ ID NO: 334 - protein, 771 aa, Triticum aestivum
MPAARLSSIPTSSFRASSRAPLAALAVATERVRAGTLSREDAHHLFDELLGQAAAVPERGLNNFLAALARAPPSAACRDGPGLAIALFNRMSRGTGARVVSPTLCTYSILMDCCCRAGRPDLVVAFFGRLLRLGLRLDVISLSNLLKGLCQAKRSNEALDLLLHRMPELHCAPGVFSYNIVINGCLKEGEVDKACNLFHEMPQLGVQPDVVTYTSIMDALSKSGAMDKAEVLLRQMVDQGIEPNIRTYSCLIHGYSTFGQWKEALRVFKEMATLGVVPDVVTLSSLIDSLCKHRRTKEAREIFDSMAAKGLKPNIVSYSTMLNGYVKEGSFEDMTDLFNSMVRNGIVPDHHIFNIQINAYAKRGLMDEAMHMFEVMRQQGVNPDVFDYQIIMDSLCKMGRMDAALDKFNQMVNQGVSPNKAVYQCLVLGSCSHGDFVKAKELISEAVNRGLCSNSVFFYPVINDLCKEGKVKEAQDMFDFILGIGQRPDVIMYTSLMDGYCLVGKVEKALSVLDAMKFAGLQPDDVVYGTLLNSYCKIGRIADGLSLFREMSLSGVKPTTIIYNIILDGLFCSGRTGSAKEKFHTMTESGIPVGVDTYNIVLSGLCRNNCTDEAIELFKKLRATNVKIDVMTLNIMISAMFKTRRIEEAKDLFATISAIGLVPSVVTYSLMMTNFIKEGLLADADDTFLVMEKAGCAPNSSLLNQVVRVLLEKGAVLKAATYLAKLDAKQLSVEVSTISLIVSLFSGEGKLREHVELLPVKYQPPQSSADN

SEQ ID NO: 335 - protein, 681 aa, Triticum aestivum
MSRGAGARVVSPTLCTYSILMDCCCRAGRPDLVLAFFGRLLRLGLRLDVISLSNLLKGLCQAKRSNEALDLLLHRMPELHCAPDVFSYNIVINGCLKEGEVDKACNLFHEMPQLGVQPDVVTYTSIMDALSKSGAMDKAEVLLRQMVDQGIEPNIRTYSCLIHGYSTFGQWKEALRVFKEMASLGVVPDVVTLSSLIDSLCRHRRTKQAREIFDSMAAKGLKPNIVSYSTMLKGYVKEGSFEDMTDLFNSMVRNGIVPDHHIFNIQINAYAKRGLMDEAMHMFEVMRQQGVNPDVFDYQIIMDSLCKMGRMDAALDKFNQMVNQGVSPNKAVYQCLVLGSCSHGDFVKAKELISEAVNRGLCSNSVFFYPVINDLCKEGKVKEAQDMFDFILGIGQRPDVIMYTSLMDGYCLVGKVEKALSVLDAMKFAGLQPDDVVYGTLLNGYCKIGRIADGLSLFREMSLSGVKPTTIIYNIILDGLFCSGRTGSAKEKFHTMTESGIPVGVDTYNIVLSGLCRNNCTDEAIELFKKLCATNVKIDVMTLNIMISAMFKTRRIEEAKDLFATISAIGLVPSVVTYSLMMTNFIKEGLLADADDTFLVMEKAGCAPNSSLLNQVVRVLLEKGAVLKAATYLAKLDAKQLSVEVSTISLIVSLFSGEGKLREHVELLPVKYQPPQSSADN

SEQ ID NO: 336 - protein, 681 aa, Triticum aestivum; identical to SEQ ID NO: 335

SEQ ID NO: 337 - protein, 771 aa, Triticum aestivum; identical to SEQ ID NO: 334

SEQ ID NO: 338 - protein, 519 aa, Triticum aestivum
  SITE 350: note = misc_feature - Xaa can be any naturally occurring amino acid
  SITE 509: note = misc_feature - Xaa can be any naturally occurring amino acid
  SITE 517: note = misc_feature - Xaa can be any naturally occurring amino acid
MPQLGVQPDVVTYTSIMDALSKSGAMDKAEVLLRQMVDQGIEPNIRTYSCLIHGYSTFGQWKEALRVFKEMASLGVVPDVVTLSSLIDSLCRHRRTKQAREIFDSMAAKGLKPNIVSYSTMLKGYVKEGSFEDMTDLFNSMVRNGIVPDHHIFNIQINAYAKRGLMDEAMHMFEVMRQQGVNPDVFGYQIIMDSLCKMGKMDAALDKFNQMVNQGVSPNKAVYQCLVLGSCSHGDFVKAKELISEAVNRGMCSNSVFFYPVINDLCKEGKVKEAQDMFDFILGIGQRPDVIMYTSLMDGYCLVGKVEKALSVLDAMKFAGLQPDDVVYGTLLNSYCKIGRIADGLSLFRXMSLSGVKPTTIIYNIILDGLFCSGRTGSAKEKFHTMTESGIPVGVDTYNIVLSGLCRNNCTDEAIELFKKLRATNVKIDVMTLNIMISAMFKTRRIEEAKDLFATISAIGLVPSVVTYSLMMTNFIKEGLLADADDTFLVMEKAGCAPNSSLLNQVVRXLLEKGAVXNE

SEQ ID NO: 339 - protein, 681 aa, Triticum aestivum; identical to SEQ ID NO: 335

SEQ ID NO: 340 - protein, 771 aa, Triticum aestivum
MPAARLSSIPTSSFRASSRAPLAALAVATERVRAGTLSREDAHHLFDELLGQAAAVPERGLNNFLAALARAPPSAACRDGPGLAIALFNRMSRGTGARVVSPTLCTYSILMDCCCRAGRPDLVLAFFGRLLRLGLRLDVISLSNLLKGLCQAKRSNEALDLLLHRMPELHCAPGVFSYNIVINGCLKEGEVDKACNLFHEMPQLGVQPDVVTYTSIMDALSKSGAMDKAEVLLRQMVDQGIEPNIRTYSCLIHGYSTFGQWKEALRVFKEMATLGVVPDVVTLSSLIDSLCKHRRTKEAREIFDSMAAKGLKPNIVSYSTMLNGYVKEGSFEDMTDLFNSMVRNGIVPDHHIFNIQINAYAKRGLMDEAMHMFEVMRQQGVNPDVFDYQIIMDSLCKMGRMDAALDKFNQMVNQGVSPNKAVYQCLVLGSCSHGDFVKAKELISEAVNRGLCSNSVFFYPVINDLCKEGKVKEAQDMFDFILGIGQRPDVIMYTSLMDGYCLVGKVEKALSVLDAMKFAGLQPDDVVYGTLLNSYCKIGRIADGLSLFREMSLSGVKPTTIIYNIILDGLFCSGRTGSAKEKFHTMTESGIPVGVDTYNIVLSGLCRNNCTDEAIELFKKLRATNVKIDVMTLNIMISAMFKTRRIEEAKDLFATISAIGLVPSVVTYSLMMTNFIKEGLLADADDTFLVMEKAGCAPNSSLLNQVVRVLLEKGAVLKAATYLAKLDAKQLSVEVSTISLIVSLFSGEGKLREHVELLPVKYQPPQSSADN

SEQ ID NO: 341 - protein, 787 aa, Triticum aestivum
MPRFSSSTPMSPPRLRLRLCARHSSSTSHPSRIWDPHAAFAAATQRAHSGNLTPEDAHHLFDELLRQGNPVQERPLNNFLATLARAPASASCSDGPALAVALFGRLSGGAGRRVAQPNVFTYGVLMDCCCRACRTDLALAFFGRLFRTGLEANQVIFCTLLKGLCHAKRTDEALDVLLHRMPELGCTPYVVAYNTVIHGFFREGQVGKACDLFHGMAQQGVMPDVVTYNSVIDALCKARAMDKAEYFLRQMVDNGVVPNTVTYNSLIHGYSSSGHWKEAVRVFKEMASQRVTADVHTYNMFMTFLCKHGRSKEAAGIFDTMAIKGLKPDNVSYAIRLHGYATEGCLVDMINLFNSMERDCILPDCRIFNILINAYAKSGKLDKAMLIFNEMQKQGVSPNAVTYSTVIDAFCKKGQLDDAMIKFNQMIDTGVPQGTAVYGSLIQGFCTHGNLVKAKELLTEMMNKGIPPPDIKFFHSIMQNLCTEGRVIEAHDVLGLIAHIGMRPNVCTFNILSGGYCLVGKMEDASKIFDDMMSYGLEPSNMTYGILINGYCKNERINDGLILFKEMLRKGLKPTTFNYNVILDGLFLTGRTVAAKEKFDEMVESGVSVCIDTYSIVLGGLCRNNCSGEAIMLFQKLSTMDVKFNITIVNIMIDAFYRVQRNQEAKDLFAAVSANGLVADVFTYTIMMKNLIKEGSVEEADDLFLSMEKSGCTADSYMLNLIVRMLLEKGELVKAGNYMSKVDAMSYSLEAETVSLLISLFSGKGKYREHIGLLPTKYRFHEEAATV

SEQ ID NO: 342 - protein, 787 aa, Triticum aestivum
MPRFSSSTPMSPPRLRLRLCARHSSSTSHPSRIWDPHAAFAAATQRARSGNLTPEDAHHLFDELLRQGNRVQERPLNNFLATLARAPASASCSDGPALAVALFGRLSGGAGRRVAQPNVFTYGVLMDCCCCACRTDLALAFFGRLLKTGLEADQVVFCTLLKGLCHAKRADEALDVLLHRMPELGCTPYVVAYNTVIHGFFREGQVGKACNLFHEMRQQGVTPDVVTYNTVIDALCKAKAMDKAEYFLGQMVDDGVVPDNVTYNSLIHGYSSSGHSKEAVRVLKEMTSKGIIPDVFTCNSLMASLCKNGRSKEAAEIFDSMSMKGLKPNTVSYAILLHGYAIEGCLVDMINLFNSMATDCILPNCHIFSILINAYAKSGKLDKAMLIFHEMQKQGVSPNAVTYSTVIDAFCKKGQLDDAMIKFNQMIDTGVRQGTAVYGSLIQGFCTHGDLVKAKELLTEMMNKGIPPPDIKFFHSIMQNLGTEGRVIEARDVLGLIAHIGMRPNVCTFNILIGGYCLVGKMEDASKIFDDMMSYGLEPSNITYGILINGYCKNERINDGLILFKEMLRKGLKPTTFNYNVILDGLFLTGRTVAAKEKFDEMVESGVSVCIDTYSIVLGGLCKNNCSGEAITLFQKLSTMDVKFNITIVNIMIDAFYRVQRNQEAKDLFAAVSANGLVANVFTYTIMMKNLIKEGSVEEADDLFLSMEKSGCTADSYMLNLIVRMLLEKGELVKAGNYMSKVDAMSYSLEAETVSLLISLFSGKGKYREHIGLLPTKYRFHEEAATV

SEQ ID NO: 343 - protein, 779 aa, Triticum aestivum
MSPPRLRLRLCARHSSSTSHPSRIWDPHAAFAAATERAHSGNLTPEDAHHLFDELLRQANPVQERPLNNLLAALARAPASAACSDGPALTVNLFSRISQGARRRVAHPTACTYGILMDCCCRAHRLDLAFAFFGCLLRTGLKAGVIQVCTLLKGLCRAKRADEALDMLLHRMPELGCTPNVVAYTTVIHGFFKEGQVGKACNLFHGMAQQGVMPDVVTYNSVIDALCKARAMDKAEYFLRQMVDNGVVPNNVTYNSLIHGYSSSGHWKEAVRVFKEMTSRRVTADVHTYNMFMTFLCKHGRSKEAAGIFDTMAMKGLKPDNVSYAIRLHGYATEGCLVDMINLFNSMERDCILPDCYIFNILINAYAKSGKLDKAMLIFNEMQKQGVSPNAVTYSTVIDAFCKKGQLDDAMIKFNQMIDTGVRQGTAVYRSLIQGFCTHSDLVKAKELLTEMMNKGIPPPDIKFFHSIMQNLCTEGRVIEARDILGLIAHIGMRPNVCTFNILIGGYCLVGKMEDASKIFDDMMSYGLEPCNITYGILINGYCKNRRIDDGLILFKEMLHKGLKPTTFNYNVILDGLFLVGRTVAAKEKFDEMVESGVCVCIDTYSIVLGGLCRNNCSGEAITLFQKLSTMEVKFNITIVNIMIDAFYKVQRNQEAKDLFAAVSANGLVADVFTYTRMMKNLIKEGSVEEADDLFLSMEKSGCTADSYMLNLIVRMFLGKGEIVKAGNYISKIDAKSYSLEAKTVSLLISLFSGKGKYREHIGLLPAKYRFREEAATVV

SEQ ID NO: 344 - protein, 779 aa, Triticum aestivum
MSPPRLRLRLCARHSSSTSHPSRIWDPHAAFAAATERAHSGNLTPEDAHHLFDELLRQANPVQERPLNNLLAALARAPASAACSDGPALTVNLFSRISQGARRRVAHPTACTYGILMDCCCRAHRLDLAFAFFGCLLRTGLKAGVIQVCTLLKGLCRAKRADEALDMLLHRMPELGCTPNVVAYTTVIHGFFKEGQVGKACNLFHGMAQQGVMPDVVTYNSVIDALCKARAMDKAEYFLRQMVDNGVVPNNVTYNSLIHGYSSSGHWKEAVRVFKEMTSRRVTADVHTYNMFMTFLCKHGRSKEAAGIFDTMAMKGLKPDSVSYAIRLHGYATEGCLVDMINLFNSMERDCILPDCRIFNILINAYAKSGKLDKAMLIFNEMQKQGVSPNAVTYSTVIDAFCKKGQLDDAMIKFNQMIDTGVRQGTAVYRSLIQGFCTHSDLVKAKELLTEMMNKGIPPPDIKFFHSIMQNLCTEGRVIEARDILGLIAHIGMRPNVCTFNILIGGYCLVGKMEDASKIFDDMMSYGLEPCNITYGILINGYCKNRRIDDGLILFKEMLHKGLKPTTFNYNVILDGLFLAGRTVAAKEKFDEMVESGVSVCIDTYSIVLGGLCRNNCSGEAITLFQKLSTMEVKFNITIVNIMIDAFYKVQRNQEAKDLFAAVSANGLVADVFTYTRMMKNLIKEGSVEEADDLFLSMEKSGCTADSYMLNLIVRMFLGKGEIVKAGNYISKIDAKSYSLEAKTVSLLISLFSGKGKYREHIGLLPAKYRFREEAATVV

SEQ ID NO: 345 - protein, 779 aa, Triticum aestivum
MSPPRLRLRLCARHSSSTSHPSRIWDPHAAFAAATERARSGNLTPEDAHHLFDELLRQANPVQERPLNNLLAALARAPASAACSDGPALTVNLFSRISQGARRRVAHPTACTYGILMDCCCRAHRLDLAFAFFGCLLRTGLKAGVIQVCTLLKGLCRAKRADEALDMLLHRMPELGCTPNVVAYTTVIHGFFKEGQVGKACNLFHGMAQQGVMPDVVTYNSVIDALCKARAMDKAEYFLRQMVDNGVVPNNVTYNSLIHGYSSSGHWKEAVRVFKEMTSRRVTADVHTYNMFMTFLCKHGRSKEAAGIFDTMAMKGLKPDSVSYAIRLHGYATKGCLVDMINLFNSMERDCILPDCRIFNILINAYAKSGKLDKAMLIFNEMQKQGVSPNAVTYSTVIDAFCKKGQLDDAMIKFNQMIDTGVRQGTAVYRSLIQGFCTHSDLVKAKELLTEMMNKGIPPPDIKFFHSIMQNLCTEGRVIEARDILGLIAHIGMRPNVCTFNILIGGYCLVGKMEDASKIFDDMMSYGLEPCNITYGILINGYCKNRRIDDGLILFKEMLHKGLKPTTFNYNVILDGLFLAGRTVAAKEKFDEMVESGVSVCIDTYSIVLGGLCRNNCSGEAITLFQKLSTMEVKFNITIVNIMIDAFYKVQRNQEAKDLFAAVSANGLVADVFTYTRMMKNLIKEGSVEEADDLFLSMEKSGCTADSYMLNLIVRMFLGKGEIVKAGNYISKIDAKSYSLEAKTVSLLISLFSGKGKYREHIGLLPAKYRFREEAATVV

SEQ ID NO: 346 - protein, 230 aa, Triticum aestivum
  SITE 171: note = misc_feature - Xaa can be any naturally occurring amino acid
  SITE 197: note = misc_feature - Xaa can be any naturally occurring amino acid
  SITE 201: note = misc_feature - Xaa can be any naturally occurring amino acid
  SITE 204: note = misc_feature - Xaa can be any naturally occurring amino acid
MDKFNEMTDMGFQPDTTVYHSLIQGFCMHGDLVKAKGLVSEMMNKGIPRPDIAFFNSIINTLCKEGGVMDAQDVFDLVTAIDERPNIITFNSLIDGYCLVGEMDKAFGVLDAMKSVGAEPDIVTYNTLVNGYCRNGRIDDGLTLFREMPHKRIKPDTVTYGIILDGLFHAXRTVVARKMFHEMIESETTVDIPVYNXILKXLFXCITYNLSSLKSSRKQCFDILSARFHK

SEQ ID NO: 347 - protein, 321 aa, Triticum aestivum
MDKFNEMTDMGFQPDTTVYHSLIQGFCMHGDLVKAKGLVSEMMNKGIPRPDIAFFNSIINTLCKEGGVMDAQDVFDLVTAIDERPNIITFNSLIDGYCLVGEMDKAFGVLDAMKSVGAEPDIVTYNTLVNGYCRNGRIDDGLTLFREMPHKRIKPDTVTYGIILDGLFHAARTVVARKMFHEMIESETTVDIPVYNIILKGLCRNNCADEAIAMFQKLGAMNVKFDIGTLNTMINSLYKVGRKEEAKDLFAAISASRLVPNASTYSIMIINYLKEGSVEDAKHIFFINGQEWYSSQLSSYKLYHQNVVFLRKYHQNVVGKR

SEQ ID NO: 348 - protein, 209 aa, Triticum aestivum
MKSVGAEPDIVTYNTLVNGYCRNGRIDDGLTLFREMPHKRIKPDTVTYGIILDGLFHAARTVVARKMFHEMIESETTVDIPVYNIILKGLCRNNCADEAIAMFQKLGAMNVKFDIGTLNTMINSLYKVGRKEEAKDLFAAISASRLVPNASTYSIMIINYLKEGSVEDAKHIFFINGQEWYSSQLSSYKLYHQNVVFLRKYHQNVVGKR

SEQ ID NO: 349 - protein, 321 aa, Triticum aestivum; identical to SEQ ID NO: 347

SEQ ID NO: 350 - protein, 174 aa, Triticum aestivum
MPHKRIKPDTVTYGIILDGLFHAARTVVARKMFHEMIESETTVDIPVYNIILKGLCRNNCADEAIAMFQKLGAMNVKFDIGTLNTMINSLYKVGRKEEAKDLFAAISASRLVPNASTYSIMIINYLKEGSVEDAKHIFFINGQEWYSSQLSSYKLYHQNVVFLRKYHQNVVGKR

SEQ ID NO: 351 - protein, 209 aa, Triticum aestivum; identical to SEQ ID NO: 348

SEQ ID NO: 352 - protein, 209 aa, Triticum aestivum; identical to SEQ ID NO: 348

SEQ ID NO: 353 - protein, 654 aa, Triticum aestivum
MPRRSRPAGGILMGCFCGAHRPDLGLALFGRFLGTGLKTNKIVATTFLKCLCYAKRTDEAVNLLLRRMPELGCVPDAISYTIVLKSLCENSMSQRALDLLQMVAEGGGACSLNVVVYSTVIHGFFKEGETGKACNLFHEMIHQGVVPNVVTYSSIIDALCKARAMDKAELVLQQMVDSGAQPNNVTYTCMIHGYSTSGQLKEAAKMFRKMTTRGLVPDIVTCSSLMTFLCKHGRSKEAAEIFYSMTAKGLKPNIIAYSILLHGYATEGCFVDMNNLFNSMEDNGIAANCYVFNILIYAYAKRGMMDEAMLIFTEMREKGVSPDVVTYSTVIAAFCRLRRLANAMDKFNEMTDMGFQPDTTVYHSLIQGFCMHGDLVKAKGLVSEMMNKGIPRPDIAFFNSIINTLCKEGGVMDAQDVFDLVTAIDERPNIITFNSLIDGYCLVGEMDKAFGVLDAMKSVGAEPDIVTYNTLVNGYCRNGRIDDGLTLFREMPHKRIKPDTVTYGIILDGLFHAARTVVARKMFHEMIESETTVDIPVYNIILKGLCRNNCADEAIAMFQKLGAMNVKFDIGTLNTMINSLYKVGRKEEAKDLFAAISASRLVPNASTYSIMIINYLKEGSVEDAKHIFFINGQEWYSSQLSSYKLYHQNVVGKR

SEQ ID NO: 354 - protein, 664 aa, Triticum aestivum
MPRRSRPAGGILMGCFCGAHRPDLGLALFGRFLGTGLKTNKIVATTFLKCLCYAKRTDEAVNLLLRRMPELGCVPDAISYTIVLKSLCENSMSQRALDLLQMVAEGGGACSLNVVVYSTVIHGFFKEGETGKACNLFHEMIHQGVVPNVVTYSSIIDALCKARAMDKAELVLQQMVDSGAQPNNVTYTCMIHGYSTSGQLKEAAKMFRKMTTRGLVPDIVTCSSLMTFLCKHGRSKEAAEIFYSMTAKGLKPNIIAYSILLHGYATEGCFVDMNNLFNSMEDNGIAANCYVFNILIYAYAKRGMMDEAMLIFTEMREKGVSPDVVTYSTVIAAFCRLRRLANAMDKFNEMTDMGFQPDTTVYHSLIQGFCMHGDLVKAKGLVSEMMNKGIPRPDIAFFNSIINTLCKEGGVMDAQDVFDLVTAIDERPNIITFNSLIDGYCLVGEMDKAFGVLDAMKSVGAEPDIVTYNTLVNGYCRNGRIDDGLTLFREMPHKRIKPDTVTYGIILDGLFHAARTVVARKMFHEMIESETTVDIPVYNIILKGLCRNNCADEAIAMFQKLGAMNVKFDIGTLNTMINSLYKVGRKEEAKDLFAAISASRLVPNASTYSIMIINYLKEGSVEDAKHIFFINGQEWYSSQLSSYKLYHQNVVFLRKYHQNVVGKR

SEQ ID NO: 355 - protein, 664 aa, Triticum aestivum; identical to SEQ ID NO: 354

SEQ ID NO: 356 - protein, 788 aa, Triticum aestivum
MPRFSSTTSMSSLRLRLHARHSSSASQPSHSQGWDPHAAFAAATQRARSGSLTPADAHHLFDELLRQANPVQERPLNNLLAAIARAPASNACRNGPALAVALFSRISQGARLWVVQPTACTYGILMDCCCRARRPDLSLAFFGRLLKTGLEANQVVFNTLLKGLCHTKRADEALDVLLHRMPELGCTPDVVAYNTVIHGFFKEGHVSKACNLFHEMAQQGVKPNVVTYNSVIDALCKARAMDKAEVVLRQMIDDGVGPDNVTYSSLIHGYSSSGHWKEAVRVFKEMTSRRVTPNVHTYNMFITFLCKHGRSKEAAGIFDSMAMKGLKPDNVSYAILLHGYATEGCLVDMINLFNSMERDCILPNCRIFSILINAYAKSGKLDKAMLIFKEMQKQGVSPDAFTYSTVIHAFCKKGRLDDAVIKFNQMIDTGVRPDTAVYRSLIQGFCTHGDLVKAKEYVTEMMKKGMLPPDIMFFSSIMQNLCTEGRVTEARDILDLIVHIGMRPNVIIFNLLIGGYCLVRKMADALKVFDDMVSYGLEPCNFTYGILINGYCKNRRIDDGLILFKEMLHKGLKPTTFNYNVILDGLFLAGQTVAAKEKFDEMVESGVSVCIDTYSIVLGGLCRNSCSSEAITLFRKLSAMNVKFDITIVNIIIGALYRVERNQEAKDLFAAMPANGLVPNAVTYTVMMTNLIKEGSVEEADNLFLSMEKSGCTANSCLLNHIIRRLLEKGEIVKAGNYMSKVDAKSYSLEAKTVSLLISLFSRKGKYREHIKLLPTKYQFLEEAATVE

SEQ ID NO: 357 - protein, 778 aa, Triticum aestivum
MSNLRLLRRSSSSMSTTRSPLSRVWSPHSAFAAATERVRTGTLSQDDAHHLFDELLRQGNPVQERPLNNFLAALARAPASASCSDGPALAVALFGRLSRGAGQRVAQPNVFTYGVLMDCCCRACRTDLALAFFGRLLRTGLQAGQVVFNTLLKGLCHTKRADEALDVLLHRMPELGCTPDVVAYNTVIHGFFREGQVGKACDMFHGMAQKGVMPNVVTYNSVIDALCKARAMDKAETVLSQMVNDGVRPDNVTYNSLIHGYSSLGNWKEAVRVFKEMSRRFTPDVITCTSLMAFLCKNGKSKEAAEIFDSMAMKGLKRDTVSYAILLHGYATEGCLVDMINLFNSMATDCILPNCHIFNILINAYAKSGMMGEAMLIFKKMHEQGVSPDVVTYSTVIHAFCKMGSLDIAMDKFNQMVDMGVRPNAIVYHSLIQGFCTHGDLVKAKELVTEMRNKAMRPPDIKIFHSIMKNLCTEGRVIEARDILDLMVHIGMRPDVPIFNLLIGGYCLVHKMEDATKMFDDMVSYGLEPCNSTYGILINGYCKNGRIDDGLNLFKEMLRKGLKPTTFNYNVILDGLFLAGRTVAAKEKFDEMVESGVSVCIDTYSIVLGGLCRNNCTGEAITLSKKLSTMNVKFNIAIVNILIGAFFRVRRNQEAKDLFAAIPANGLVANVVTYSMMMINLIKEGSLEEADDLFLSMEKSGCTADSCMLNHIIRRLLERGEIVKAGNYMSKVDAKSYSLEAKTVSLLISLFLGKGRYREHMKLLPMKYQFLEEAATVE

SEQ ID NO: 358 - protein, 790 aa, Triticum aestivum
MPRFSSTTPMSPLRLRLRLRLGARHSSSTSHSSRSWDPHSAFAAAAERARSGNLTPEDAHHLFDELLRQGNPVQDRPLNKLLSALARAPASAACRNGPALAVNLFSRISQGARRRVAEPTACTYGILMDCCCRAHRLDLTLAFFGGLLKTGLKAGVIQVCTLLKGLCRAKRADEALDVLLHRMPELGCTPDVVAYTTVIHGFFKEGQVGKACNLFHGMAQQGVAPNLVTYNSVIDALCKAKAMDKAEYFLGQMVDDGVVPDNVTYNSLIHGYSSSGHWKEAVRVFKEMTSRRVTADVHTYNMFMTFLCKHGRSKEAAGIFDTMAIKGLKPDNVSYAIRLHGYATEGCLVDMINLFNSMERDCILPDCRIFSILINAYAKSGKLDKAMLLFKEMQKQGVSPDAVTYSTVIDAFCKKGQLDDAMIKFNQMIDTGVRQGTAVYGSLIQGFCTHGDLVKAKELLTEMMNKGIPPPDIKFFHSIMQNLCTEGRVIEAQDILDLMVHTGERPNVVTFSVLVGGYCLVRKMADASKVFDDMVSYGLEPCNIMYGILINGYCKNRRIDDGLILFKEMLHKGLKPTTFNYNVILNGLFLAGQTVAAKEKFDEMVESGVSVCIGTYSIVLGGLCRNGCSSEAITLFRKLSAMNVKFNITIVNTIIGAFYRVERNQEAKDLFAAVSANGLVADVFTYTIMMKNLIKEGSVEEADDLFLSMEKSGCTADSYMLNLIVRMFLGKGEIVKAGNYISKIDAKSYSLEAKTVSLLISLFSGKGKYREHIGLLPAKYRFREEAATVV

SEQ ID NO: 359 - protein, 792 aa, Triticum aestivum
MPRFSSTTPMSPPRLLLRLGARHSSSTSHPSRIWDPHAAFAAATQRARSGTLTTEDAHHLFDELLRQGNPVQERPLTNFLAALARAPASAFCSDGPALAVALFGRLSRGAGRRVAQPNVFTYGVLMDCCCRARRLDLAIAFFARLLKTGLEANQVIFCTLLKGLCHAKRSDEALDVVLHRMPELGCTPNVVAYTTVIHGFLKEGQVGKACNLFHGMAQQGVAPDVVTYNSVIDALCKARAMDKAEYFLREMVDNGVVPNNVTYNSLIHGYSSLGHQKEAVRVLKEMTRQGIIPDVITCTSLMTFLCKNGKSKEAAEIFDSMATKGLKHDAVSYAILLHGYATEGCLVDMINLFNSMDRDCILPNCHIFNILIYAYAKSGKLDKAMLIFRDMQKQGVSPDAFTYSTLIHAFCKKGRLDDAMIKFNQMVDTGVRQGTAVYGSLIQGFCTHGDLVKGKELVTEMMNKGIPPPDIMFFHSIMQNLCTEGRVVEARDILGLIAHIGMRPNVCTFNILIGGYCLVRKMEDASKIFHDMMSYGLEPSNVTYGILINGYCKNRRIDDGLILFKEMLRKGLKPTTFNYNIILDGLFLAGRTVAAKEKFDEMVESGVSMCISTYSIVLRGLCRNNCSGEAITLFQTLSAMDVKFNIRIVNIMIDAFFRVQRKQEAKDLFAAITANGLVANVFTYSLMMTNLIKEGSVEEADTLFLSMEMSGCTSNSWMLNLIIRGLLEKGEIVKAGCYMSKVDAKSYSLEAKTVSLLIYLFSGKGKYREHIRLLPTKYQFLEEAATVEWFAI

SEQ ID NO: 360 - protein, 792 aa, Triticum aestivum
MPRFSTTTPMSPPRLLLRLGARHSSSTSHPSRIWDPHAAFAAATQRARSGTLTTEDAHHLFDELLRQGNPVQERPLTNFLAALARAPASAFCSDGPALAVALFGRLSRGAGRRVAQPNVFTYGVLMDCCCRARRLDLAIAFFARLLKTGLEANQVIFCTLLKGLCHAKRSDEALDVVLHRMPELGCTPNVVAYTTVIHGFLKEGQVGKACNLFHGMAQQGVAPDVVTYNSVIDALCKARAMDKAEYFLREMVDNGVVPNNVTYNSLIHGYSSLGHQKEAVRVLKEMTRQGIIPDVITCTSLMTFLCKNGKSKEAAEIFDSMATKGLKHDAVSYAILLHGYATEGCLVDMINLFNSMDRDCILPNCHIFNILIYAYAKSGKLDKAMLIFRDMQKQGVSPDAFTYSTLIHAFCKKGRLDDAMIKFNQMVDTGVRQGTAVYGSLIQGFCTHGDLVKGKELVTEMMNKGIPPPDIMFFHSIMQNLCTEGRVVEARDILGLIAHIGMRPNVCTFNILIGGYCLVRKMEDASKIFHDMMSYGLEPSNVTYGILINGYCKNRRIDDGLILFKEMLRKGLKPTTFNYNIILDGLFLAGRTVAAKEKFDEMVESGVSMCISTYSIVLRGLCRNNCSGEAITLFQTLSAMDVKFNIRIVNIMIDAFFRVQRKQEAKDLFAAITANGLVANVFTYSLMMTNLIKEGSVEEADTLFLSMEMSGCTSNSWMLNLIIRGLLEKGEIVKAGCYMSKVDAKSYSLEAKTVSLLIYLFSGKGKYREHIRLLPTKYQFLEEAATVEWFAI

SEQ ID NO: 361 - protein, 792 aa, Triticum aestivum; identical to SEQ ID NO: 359

SEQ ID NO: 362 - protein, 792 aa, Triticum aestivum; identical to SEQ ID NO: 360

SEQ ID NO: 363 - protein, 788 aa, Triticum aestivum
MPRFSSTMPMSPPHLLLRLCARHSSSTSHPSRIWDPHAAFAAATQRARSGTLTTEDAHHLFDELLRQGNPVQERPLTNFLAALARAPASASCSDGPALAVALFGRLSRGAGRRVAQPNVFTYGVLMDCCCRARRLDLAIAFFGRLLKTGLEADRVVFSTLLKGLCHAKRSDEALDVLLHRMPEQGCTPYVVAYNTVIHGFFREGQVGKACDLFHGMAQQGVMPDVVTYNSVIDALCKARAMDKAEYFLRQMVDDGVVPNNVTYNSLIHGYSSSGHWKEAIRVFKEMTSRRITADVHTYNMFMTFLCKHGRSEEAAGIFDTMAMKGLKPDNVSYAIRLHGYATEGCLVDMINLFNSMERDCILPDCCIFNILINAYAKSGKLDKAMLIFNEMQKQGVSPDAVTYLPVIDAFCKKGRLDDAMIMFNQMIDTGVRPATAVYTSLIQGFCTHGDLVKAKELVTEMMNKGIPPPDIKFFHSIMQNLCTEGRVTEARDILGLIAHIGMRPNVCTFNILIGGYCLVRKMTDASKVFDDMVSYGLEPCNFTYGILINGYCKNRRIDDGLTLFKEMLHKGLKPKAFNYNVILDGLFLAGQTVAAKEKFDEMVESGVSVCIDTYSIVLGGLCRNSCSSEAITLFRKLSAMNVKFDITIVNTIIGAFYRVERNQEAKDLFAAIPASGLVPNVVTYTIMMKNLIKEGSVEEADNLFLSMEKSGCSANSYLLNHIIRRLLEKGERVKAGNYMSKVDAKSYSLEAKTVSLLISLFSRKGKYREHIKLLPTKYQFLEEAATVE

SEQ ID NO: 364 - protein, 742 aa, Triticum aestivum
MSPLRLHARRSYSTSHPPRSQGWDPHAAFAAATERARSGNLTSEDAHKLFDQLLLQANPVNMRLPNDLLTALARAPASAACSNGPALAVTLFTRLSRGARQPVVQPTACTYGILMDCCCRANRQDLALAFFARLLRTGLKAGVIEVNTLLKGLCRAKRADEALDILLHRMPELGCTPNVVAYTTVIHGFLKEGQVGKACNLFHGMAQQGVAPNVVTYNSVIDALCKARAMDKAEYFLRQMVDNGVVPDNVTYNSLIHGYSSSGHWKEAVRVLKEMTSQGIIPDIVSYRILLHGYATKGCLVDMINLFNSMARYCILPDCHIFNILINAYAKSGKLDKAMLIFKEMQKQGVSPDAVTYSTVIHAFCKNGRLDDAVIKFNQMIDTGVQPDTSVYNALIQGFSTNGDLVKAKELVTEMMNKGIPPPDIKFFHSIMQNLCTEGRLTEARDILGLIAHIGMRPNVCTFNILIGGYCLVRKMADASKVFDDMVSYGLEPCNFTYGILINGYCKNRRIDDGLILFKEMLHKGLKPTTFNYNVILDGLFLAGQTVAAKEKFNEMVESGVSVCIDTYSIVLGGLCTNNCCGEAITLFQKLSTMEVKFDIIIVNTMIDAFYRVRQNQEAKDLFAAVSANGLVANVFTYTIMMTNLIKEGSLEEADNLFLSMEKSGCTADSFMLNLIIRRLLEKGEIVKAGNYISKVDAKSYSLEAKTVSLLISLFSGKGKYRAHIRLLPSKYQFREEAGTVE

SEQ ID NO: 365 - protein, 287 aa, Triticum aestivum
MRPNVCTFNILIGGYCLVRKMADASKVFDDMVSYGLEPCNFTYGILINGYCKNRRIDDGLILFKEMLHKGLKPTTFNYNVILDGLFLAGQTVAAKEKFNEMVESGVSVCIDTYSIVLGGLCTNNCCGEAITLFQKLSTMEVKFDIIIVNTMIDAFYRVRRNQEAKDLFAAVSANGLVANVFTYTIMMTNLIKEGSLEEADNLFLSMEKSGCTADSFMLNLIIRRLLEKGEIVKAGNYISKVDAKSYSLEAKTVSLLISLFSGKGKYRAHIRLLPSKYQFREEAGTVE

SEQ ID NO: 366 - protein, 289 aa, Triticum aestivum
MQKQGVSPDAVTYSTVIHAFCKNGRLDDAVIKFNQMIDTGVQPNTSVYNALIQGFSTNGDLVKAKELVTEMMNKGMHPPDIKVFHSVMQNLCTEGRVTEARDILDLIVHIGMRPDVFTFTSLIGGYCLVRNMEDASKIFDDMVSYGLEPSNITYGILINGYCKNKRIDEGLILFKEMLRKGLKPTTINYNVILDGLFLAGRTVAAKEKFNEMVESGVSVCIDTYSIVLGGLCTNNCCGEAITLFQKLSKMNVKFNIRIVNIMIDAFFKVQRKQEAEDLFAAISANGLVC

SEQ ID NO: 367 - protein, 769 aa, Triticum aestivum
MPRRLPPVLLPLHTKAMPRLSSTTPMSPLRLRLRLRARHSASTSHSSRSWEPHAAFAAATERARSCNLTPEDAHHLFDELLRQAKPVQERPLNNLLAALARAPASAACSDGPALAVNLFGRISQGARRRVAHPTACTYGILMDCCCRAHRLDLAFAFFGHLLRTGLKAGVIHVCTLLKGLCRAKRADEALDVLLHRMPELGCTPDVVAYTTVIHGFFKEGQVSKACNLFHEMALQGVAPNVVTYSSVIDALCKARAMDKAEYFLRQMVHNGVLANNVTYNSLIHGYSSSGHWKEAVRVLKEMTSQGIIPDIVSYRILLHGYATEGCLVDMINLFNSMARYCILPDCHIFNILINAYAKSGKLDKAMLIFKEMQKQGVSPDAVTYSTVIHAFCKNGRLDDAVIKFNQMIDTGVQPNTSVYNALIQGFSTNGDLVKAKELVTEMMNKGMHPPDIKVFHSVMQNLCTEGRVTEARDILDLIVHIGMRPDVFTFTSLIGGYCLVRNMEDASKIFDDMVSYGLEPSNITYGILINGYCKNKRIDEGLILFKEMLRKGLKPTTINYNVILDGLFLAGRTVAAKEKFNEMVESGVSVCIDTYSIVLGGLCTNNCCGEAITLFQKLSKMNVKFNIRIVNIMIDAFFKVQRKQEAEDLFAAISANGLVANVFTYSLMMTNLIKEGSAEEADTLFLSMEKSGCTANSWMLNLIIRRLLEKGEIVKAGNYMAKVDAKSYSLEAKTVSLLISLFSGKGKYREHIRLLPTKYQFREEAATVE

SEQ ID NO: 368 - protein, 783 aa, Triticum aestivum
MARLCFTTPMPHLRRRYSSFTSPPSRRWDPRPAFAAATERVRAGTLSPEDAHHLFDELLLQANPVPERSLNGFLAALARAPSSATLRDGPSLALALFNRVCREEAGPPVAPPTVRTYNILMDSCCRARRPDLGLAFFGRFLRAGLKVNLIVASTLLKCLCHARRTDEAVNMLLHRMSEFGCVPDAISYSIVLKGLCDNSRSQQALDLLQMVRKGGACSLSVVAYSIIIHGFFKEGEVSKACNLFHEMMQQGVVPDVVTYSSIIDALCKVRAMDKAKLVLQQMVNNGVRPNMYTWNSFMYSLCKHGRSKEAAEFFNSMTAKGLKPDIVAYSTLLHGYATEGCLTDMINFFNSMERNGIVANCKVFTILIDGYAKCGMTDEAMLIFTKMQEQGVSPNVFTYAIVTAALCRMGRLSDAMEKLNEMIAMGLQPNKVVYHSLIQVFCTHGDLVKAKALVSEMMNKGIPRPNIVFFNSVINSLCKEGRVTDAHDIFDLAINIGERPDVITFNSLIDGYCLAGKMDKAFGVLDAMVSSGIEPNVVTYNTLVGGYSRNGRIDDGLTLFREMMHIKIKPTTATYGAILHGLFRAGRTFSAKKMFNEMIESGTTVNISIYAIILGGLCRNNCVDEAIVLFEKLGAMNVKLDVGIFNTMINAMYAVKGREEAEDLFAAISANGLVPNASSYGVMITNLLREGLVEEADNMFSSMDKSGCAPSSRLLNNIIRMLLEKGEISKAGNYMSKVDGKNISLEASTTSLLLSLFSREGKYREQIKLLPAKYQFFDGSSHS

SEQ ID NO: 369 - protein, 783 aa, Triticum aestivum; identical to SEQ ID NO: 368

SEQ ID NO: 370 - protein, 783 aa, Triticum aestivum; identical to SEQ ID NO: 368

SEQ ID NO: 371 - protein, 783 aa, Triticum aestivum; identical to SEQ ID NO: 368

SEQ ID NO: 372 - protein, 783 aa, Triticum aestivum; identical to SEQ ID NO: 368

SEQ ID NO: 373 - protein, 783 aa, Triticum aestivum; identical to SEQ ID NO: 368

SEQ ID NO: 374 - protein, 776 aa, Triticum aestivum
MSPPRLRLHARHSSSASQPSRSQGWDPHAAFAAAAECARSGNLTPEDAHNLFDQLLQHGNPVQERALNSLLAALARTPASAACRDGPALTVALFSRISKGRVAQPNVFTYGVLMADCCCRAHRPDLTLAFFGRFLRTGLEADQVVFNTLLKGLCHAMRAGEAVNVLLHRMPDLGCTPNVVAYNTVIHGFFREGQAGKACDMFHGMAQKGVMPNVVTYNSVIDALCKARAMDKAETVLSQMVNDGVRPDNVTYNSLIHGYSSLGNWKEAVRVFREMSQRFTPDVVTCTSLMAFLCKNGKSKEAAEIFDSMATKGLKRDTVSYAILLHGYATEGCLVDMDNLFNSMVRGCIVPDCHIFNILIDAYAKSEKLDKAMLMFKEMQKHGVSPNAVTYPTVIHAFCKMGSLDIAMDKFNQMVDMGVRPNAIVYHSLIQGFCTHGDLVKAKELVTEMRNKAMRPPDIKFFHSIMQNLCTEGRVIEARDILDLMLHIGMRPDVPIFNLLIGGYCLVREMEDATKMFDDMMSYGLEPCNNTYGILINGYCKNGKIDDGLNLFKEMLHKGLKPTTFNYNVILDGLFLAGRTVAAKVKFNEMVESGVSVCIDTYSIVLGGLCRNNCTGEAITLSKKLSTMNVKFNIAIVNILIGPFFRVRRNQEAKDLFAAIPSNGLVANVVTYSIMMTNLVKEGSVEEADTLFLSMEKSGCTANSCMLNHIIRRLLEKGEIVKARNYMSKVDAKSYSLEAKTVSLLISLFSGKGKYRERKKLLPMKYQFLEEAATVE

SEQ ID NO: 375 - protein, 323 aa, Triticum aestivum
MLPPDIAFFNSIMQNLCTEGRVIEARDVLGLIAHIGMRPDVCTFNILIGGYCLVGKMEDASKIFDDMMSYGLEPSNITYGILINGYCKNRRIDDGLILFKEMLHKGLKPTTFNYNVILDGLFLAGRTVAAKEKFDEMVESGVSVCIGTYSIVLGGLCRNNCSGEAITLFQKLSTMDVKFNITIVNIMIDAFYRVQRNQEAKDLFAAVSANGLVANVFTYTIMMKNLIKEGSVEEADDLFLSMEKSGCTADSYMLNLIVRMLLEKGELVKAGNYMSKVDAMSYSLEAETVSLLISLFSGKGKYREHIGLLPAKYRFREEAATVV

SEQ ID NO: 376 - protein, 663 aa, Triticum aestivum
MDCCCRAHRLDLAFAFFGRLLRTGLKAGVIQVCTLLKGLCRAKRADEALDVLLHRMPELGCTPDVVAYTTVIHGFFKEGQVGKACNLFHGMAQQGVAPNLVTYNLVIDALCKAKAMDKAEYFLGQMVDDGVVPDNVTYNSLIHGYSSSGHWKEAVRVFKEMTSRRVTADVHTYNMFMTFLCKHGRSKEAAGIFDTMAMKGLKPDNVSYAILLHGYATEGSLVDMINLFNSMERDCILPDCCIFNILINAYAKSGKLDKAMLIFNEMQKQGVSPNAVTYSTIIHAFCKNCRLDDAVIKFNQMIDTGVRQGTAVYRSLIQGFCTHGDLVKAKELLTEMMNKGMLPPDIAFFNSIMQNLCTEGRVIEARDVLGLIAHIGMRPDVCTFNILIGGYCLVGKMEDASKIFDDMMSYGLEPSNITYGILINGYCKNRRIDDGLILFKEMLHKGLKPKTFNYNVILDGLFLAGRTVAAKEKFDEMVESGVSVCIGTYSIVLGGLCRNNCSGEAITLFQKLSTMDVKFNITIVNIMIDAFYRVQRNQEAKDLFAAVSANGLVANVFTYTIMMKNLIKEGSVEEADDLFLSMEKSGCTADSYMLNLIVRMLLEKGGLVKAGNYMSKVDAMSYSLEAETVSLLISLFSGKGKYREHIGLLPAKYRFREEAATVV

SEQ ID NO: 377 - protein, 344 aa, Triticum aestivum
MDCCCRAHRLDLAFAFFGRLLRTGLKAGVIQVCTLLKGLCRAKRADEALDVLLHRMPELGCTPDVVAYTTVIHGFFKEGQVRKACNLFHGMAQQGVAPNLVTYNLVIDALCKAKAMDKAEYFLGQMVDDGVVPDNVTYNSLIHGYSSSGHWKEAVRVFKEMTSRRVTADVHTYNMFMTFLCKHGRSKEAAGIFDTMAMKGLKPDNVSYAILLHGYATEGSLVDMINLFNSMERDCILPDCCIFNILINAYAKSGKLDKAMLIFNEMQKQGVSPNAVTYSTIIHAFCKKGRLDDAVIKFNQMIDTGVRQGTAVYRSLIQGFCTHGDLVKAKELLTEMMNKRYASS

SEQ ID NO: 378 - protein, 788 aa, Triticum aestivum
MPRFSSTTPMSPPRLLLRLRARHSSSTSHPSRIWDPHAAFAAATERGRSGNLTPEDAHHLFDELLWQGNPVQDRPLNKLLSALARAPASAACRNGPALAVALFSRISQGARRRVAEPTACTYGILMDCCCRAHRLDLALAFFARLLKTGLEANQVIFNTLLKGLCHAKRSDEALDVLLHRMPELGCTPGVVAYNTVIHGFFKEGQVGKACNLFHEMVQQGVMPDVVTYNSVTDALCKARGMDKAEYFLRQMVDDGVVPDTVTYNSLIHGYSSSGHWKEAVRVFKEMTSRRVTPDVHTYNMFITFLWKHGRSKEAAGIFDSMAMKGLKPDNVSYAILLHGYATEGCLVDVINLFNSMATDCILPNCHIFNILINAYAKSGKLDKAMLIFREMQKQGVSPDAFTYSTLIHAFCKKGRLDDAMIKFNQMVDTGVRQGTAIYGSLIQGFCTHGDLVKGKELVTEMMNKGIPPPDIMFFHSIMQNLCTEGRVIEARDILGLIAHIGMRPNVCTFTILIGGYCLVCKMEDATKMFEDMVSFGLEPCNITYGILINGYCKNRRIDDGLILFQEMLHKGLKPTTFNYNVILDGLFLAGRTVAAKEKFDEMVESGVSVCTDTYSIVLAGLCRNNCSSEVIMLFQKLRAMNMEFNIRIVTIMIDAFYKVRRNQEAKDLFAAIPSNGLVANVVTYSIMMKNLIKEGSVEEADTLFLSMEKSGCTATPWMLNHIIRRLLERGEIVKAGNYMSKVDAKSYSLEAKTVSLLISLFSGKGKYREHIKLLPMKYQFLEEAATVE

SEQ ID NO: 379 - protein, 785 aa, Triticum aestivum
MSPLRLRLRLRPRLHARHSYSTSHPPRGQGWDPHASFAAATERARSGNLSSEDAHHLFDQLLLQANPVNMRLPNDLLTALARAPASASCSNGPALAVALFSRLSQGARQRVVQPTACTYGILMDCCCRANRQDLALAFFARLLRTGLKAGVIEVNTLLKGLCRAKRADEALDILLHRMPELGCTPNVVAYNTVIHGFFQEGQAGKACSLFHEMAQQGVAPSLVTYNSVIDALCKARAMDKAEYFLGQMVDDGVIPDNVTYNSLIHGYSSSGHWKEAVRVFKEMTSRRVKPNVHTHNMFMTFLCKHGRSKEAAGIFDTMAMKGLKHNNVSYAILLHGYATEGCLVDMINLFNSMERYCILPDCRIFNILIHAHAKSGKLDKAMLIFNEMQKQGVSPNAVTYSTIIHAFCKKGRLDDAVIKFNQMIDTGVRQGTAVYRSLIQGFCTHGDSVKAKELLTEMMNKGMLPPDIAFFNSIMQNLCTEGRVIEARDVLGLIAHIGMRPDVCTFNILIGGYCLVGKMEHASKIFDDMMSYGLEPSNITYGILINGYCKNRRIDDGLILFKEMLHKGLKPTTFNYNVILDGLFLAGRTVAAKEKFDEMVESGVSVCIGTYSIVLGGLCRNNCSGEAITLFQKLSTMDVKFNIIIVNIMIDAFYKVQRNQEAKDLFAAVSANGLVANVFTYTIMMKNLIKEGSVEEADDLFLSMEKSGCTADSYMLNLIVRMLLGKGEIVKAGNYISKIDAKSYSLEAKTVSLLISLFSGKGKYREHIGLLPAKYRFREEAATVV

SEQ ID NO: 380 - protein, 328 aa, Triticum aestivum
  SITE 15: note = misc_feature - Xaa can be any naturally occurring amino acid
  SITE 64: note = misc_feature - Xaa can be any naturally occurring amino acid
MMKKGMLPPDIKFFXSIMQNLCTEGRVIEARDVLGLIAHIGMRPDVCTFNILIGGYCLVGKMEXASKIFDDMMSYGLEPSNITYGILINGYCKNRRIDDGLILFKEMLHKGLKPTTFNYNVILDGLFLAGRTVAAKEKFDEMVESGVSVCIGTYSTVLGGLCRNNCSGEAITLFQKLSTMDVKFNIIIVNIMIDAFYKVQRNQEAKDLFAAVSANGLVANVFTYTIMMKNLIKEGSVEEADDLFLSMEKSGCTADSYMLNLIVRMLLGKGEIVKAGNYISKIDAKSYSLEAKTVSLLISLFSGKGKYREHIGLLPAKYRFREEAATVV

SEQ ID NO: 381 - protein, 785 aa, Triticum aestivum; identical to SEQ ID NO: 379

SEQ ID NO: 382 - protein, 792 aa, Triticum aestivum
MPRFSSTTPMSPPRLLLRLRARHSSSTSHPSRIWDPHAAFAAATQRARSGTLTTEDAHHLFDELLRQGNPVQERPLNNFLAALARAPASASCSGGPALAVALFGHLSRGAGRRVAQPNVFTYGVLMDCCCRACRPDLALAFFGRLLKTGLEADQVVFSTLLKGLCHAKRADEALDVLLHRMTELGCTPNVVAYNTVIHGFFREGQVGKACALFHGMAQQGVTPDVVTYNSVIDPLCKAKAMDKAEYFLCQMVDNGAVPNNVTYNSLIHGYSSSGHSKEAVRVLKEMTSKGIIPDVFTCNSLMASLCKNGRSKEAAEIFDSMSMKGLKPNTVSYAIRLHGYATEGCLIDMINLFNSMERDCILPDCHIFSILINAYAKSGKLDKAMLIFKKMRKQGVSPNAVTYSTVIDAFCKKGRLDDAVIEFNQMIDTGVRPNTAVYCSLIQGFCTHGGLVKAKEYVTEMMNKGMLPPDIMFFHSVMQNLCTEGRVIEARDILGLIAHIGMTPDACTFNILIGGYCLVCKMEDSTNMFNDMVSYGLEPCNITYGILINGYCKNRRIDEGLILFKEMLRKGLKPTTFNYNVILDGLFLAGRTVAAKEKFNEMVESGVSMWISTYSIVLRGLCRNNCSGEAITLFQKLSAMDVKFNIRIVNIMIDAFFRVQRKQEAKDLFAAITANGLVADVFTYSLMMTNLIKEGSVEEADTLFLSMEMSGCTSNSWMLNLIIRRLLEKGEIVKAGCYMSKVDAKSFSLEAKTVSLLISLFSGKGKYREHIRLLPTKYQFLEEAATVEWFAT

SEQ ID NO: 383 - protein, 792 aa, Triticum aestivum; identical to SEQ ID NO: 382

SEQ ID NO: 384 - protein, 792 aa, Triticum aestivum; identical to SEQ ID NO: 382

SEQ ID NO: 385 - protein, 792 aa, Triticum aestivum; identical to SEQ ID NO: 382

SEQ ID NO: 386 - protein, 792 aa, Triticum aestivum; identical to SEQ ID NO: 382

SEQ ID NO: 387 - protein, 792 aa, Triticum aestivum; identical to SEQ ID NO: 382

SEQ ID NO: 388 - protein, 771 aa, Triticum aestivum
MPTARLSSIFTSSFRDPSRAPLAALAAATERVRAGTLTREDAHHLFGELLGQAAAVPERGLNNFLATLARAPPSPACSDGPGLAIALFNRMSRGAGARVVSPTLCTYSILMDCCCRAGRPDLVVAFFGRLIRLGLRLEVISVSNLLKGLCQAKRTNEAVALLLHGTPELDCVPNVFSYSIVINGCFKEGEVDKACNLFHGMIQLGVQPNVVIYTSIIDALSKCRAMDKAEVVLQQMVDQGIEPNIRTYTTLIHGYSASGQWKAAVRVFKEMASVGVLPNAVTLNSFMDSLCKHRRTKEARVIFDSMAAKGQKPDVVSYSTMLSGYAKEGCFDDMTCLFNSMLQNGVVPNHHIFNILINAYAKRGLMDAAMHMFEVMRQQGVNPDVFSYQIVMDSLCKMGRMDAALDKFNQMVNQGVSPDIVVYRCLVLGSCSHGDFEKAKELISEAVNRGLCSNSVFFYPVINDLCKEGKVKEAQDMFDFIVGIGQRPDVIMYNSLMDGYCLVGKVEEALRVLDAMKSVGLQPDAFTYGILLNGYCKIGKIADGLSLFREMSLNGVKPMTIMYNIILHGLFFSGRTVSAKEIFHTMNASGIPVGVDTYNIVLSGLCKNNCTDEAIELFKKLRAMNVKINVIILNTMISAMFKTRRIEEAKDLFATISAIGLVPSVVTYSVMMTNFIKEGLLAEADDMFLAMEKASCAPNSSLLNQVVRALLEKGAVVKAATYLAKLDAKQLSVEASTISLIVSLFSGEGKLREHVELLPVKYQPPESSADN

SEQ ID NO: 389 - protein, 771 aa, Triticum aestivum; identical to SEQ ID NO: 388

SEQ ID NO: 390 - protein, 334 aa, Triticum aestivum
MPTARLSSIFTSSFRDPSRAPLAALAAATERVRAGTLTREDAHHLFGELLGQAAAVPERGLNNFLATLARAPPSPACSDGPGLAIALFNRMSRGAGARVVSPTLCTYSILMDCCCRAGRQDLVVAFFGRLIRLGLRLEVISFSNLLKGLCQAKRTNEAVALLLHGTPELDCVPNVFSYNIIINGCFKEGEVDKACNLFHGMIQLGVQPNVVIYTSIIDALSKCRAMDKAEVVLQQMVDQGIEPNIRTYTTLIHGYSASGQWKAAVRVFKEMASVGVLPNAVTLNSFMDSLCKHIEGQRKLELFLTPWLQRAKNLMSSPTLLCLAGMRKKDASMI

SEQ ID NO: 391 - protein, 771 aa, Triticum aestivum; identical to SEQ ID NO: 388

SEQ ID NO: 392 - protein, 361 aa, Triticum aestivum
MVNQGVSPDIVVYRCLVLGSCSHGDFEKAKELISEAVNRGLCSNSVFFYPVINDLCKEGKVKEAQDMFDFIVGIGQRPDVIMYNSLMDGYCLVGKVEEALRVLDAMKSAGLQPDAFTYGILLNGYCKIGKIADGLSLFREMSLNGVKPTTIMYNIILHGLFFSGRTVSAKEIFHTMNASGIPVGVDTYNIVLSGLCKNNCTDEAIELFKKLRAMNVKINVIVLNTMISAMFKTRRIEEAKDLFATISAIGLVPSVVTYSVMMTNFIKEGLLAEADDMFLAMEKASCAPNSSLLNQVVRALLEKGAVVKAATYLAKLDAKQLSVEASTISLIVSLFSGEGKLREHVELLPVKYQPPESSADN

SEQ ID NO: 393 - protein, 771 aa, Triticum aestivum; identical to SEQ ID NO: 388

SEQ ID NO: 394 - protein, 771 aa, Triticum aestivum
MPTARLSSIFTSSFRDPSRAPLAALAAATERVRAGTLTREDAHHLFGELLGQAAAVPERGLNNFLATLARAPPSPACSDGPGLAIALFNRMSRGAGARVVSPTLCTYSILMDCCCRAGRPDLVVAFFGRLIRLGLRLEVISVSNLLKGLCQAKRTNEAVALLLHGTPELDCVPNVFSYSIVINGCFKEGEVDKACNLFHGMIQLGVQPNVVIYTSIIDALSKCRAMDKAEVVLQQMVDQGIEPNIRTYTTLIHGYSASGQWKAAVRVFKEMASVGVLPNAVTLNSFMDSLCKHRRTKEARVIFDSMAAKGQKPDVVSYSTMLSGYAKEGCFDDMTCLFNSMLQNGVVPNHHIFNILINAYAKRGLMDAAMHMFEVMRQQGVNPDVFSYQIVMDSLCKMGRMDAALDKFNQMVNQGVSPDIVVYRCLVLGSCSHGDFEKAKELISEAVNRGLCSNSVFFYPVINDLCKEGKVKEAQDMFDFIVGIGQRPDVIMYNSLMDGYCLVGKVEEALRILDAMKSVGLQPDAFTYGILLNGYCKIGKIADGLSLFREMSLNGVKPMTIMYNIILHGLFFSGRTVSAKEIFHTMNASGIPVGVDTYNIVLSGLCKNNCTDEAIELFKKLRAMNVKINVIILNTMISAMFKTRRIEEAKDLFATISAIGLVPSVVTYSVMMTNFIKEGLLAEADDMFLAMEKASCAPNSSLLNQVVRALLEKGAVVKAATYLAKLDAKQLSVEASTISLIVSLFSGEGKLREHVELLPVKYQPPESSADN

SEQ ID NO: 395 - protein, 771 aa, Triticum aestivum; identical to SEQ ID NO: 388

SEQ ID NO: 396 - protein, 754 aa, Triticum aestivum
MPRFSSTPPMSPRRLRVGLGARHSSSTSHPSRSWEPHAAFAAATERARSGNLTPEDAHHRFDELLRQANPVQERPLNKRLSALAGAPASAACRNGPALAVALFSRISQGARRRVAHPTACTYGILMDCCCRAHRLDLAFAFFGRLLRTGLKAGVIQVCTLLKGLCRAKRADEALDVLLHRMPELGGCTPNVVAYTTVIHSFFKEGQVSKACNLFHEMALQGVTPDVVTYSSVIDALCKARAMDKAEYFLRQMVHNGVLPNNVTYNSLIHGYSSSGHWKEAVRVLKEMTSQGIIPDIISYRILLHGYATEGCLVDMINLFNSMARYCILPDCHIFNILINAYAKSGKLDKAMLIFKEMQKQGVSPDAVTYSTVIHAFCKNGRLDDAVIKFNQMIDTGVQPNTSVYNALIQGFSTNGDLVKAKELVTEMMNKGMHPPDIKVFHSVMQNLCTEGRVTEARDILDLIVHIGMRPDVFTFTSLSGGYCLVRNMEDASKIFDDMVSYGLEPSNITYGILINGYCKNKRIDEGLILFKEMLRKGLKPTTINYNVILDGLFLAGRTVAAKEKFNEMVESGVSVCIDTYSIVLGGLCTNNCCGEAITLFQKLSKMNVKFNIRIVNIMIDAFFKVQRKQEAEDLFAAISANGLVANVFTYSLMMTNLIKEGSAEEADTLFLSMEKSGCTANSWMLNLIIRRLLEKGEIVKAGNYMAKVDAKSYSLEAKTVSLLISLFSGKGKYREHIRLLPTKYQFREEAAIVE

SEQ ID NO: 397 - protein, 790 aa, Triticum aestivum
MISHSSSSQSSRPTHCKKQCYCTRRLPLVLLPLHTKAMPRLSSTTPMSPLRLRLRLRARHSASTSHSSRSWEPHAAFAAATERARSGKLTPEDAHHLFDELLRQAKPVQERPLNNLLAALARAPASAACSDGPALAVNLFGRISQGACRRVAHPTACTYGILMDCCCRAHRLDLAFAFFGRLLRTGLKAGVIQVCTLLKGLCRAKRADEALDMLLHRMPELGCTPNVVAYTTVIHGFFKEGQVSKACNLFHEMALQGVTPDVVTYSSVIDALCKARAMDKAEYFLRQMVHNGVLPNNVTYNSLIHGYSSSGHWKEAVRVLKEMTSQGIIPDIVSYRILLHGYATEGCLVDMINLFNSMARYCILPDCHIFNILINAYAKSGKLDKAMLIFKEMQKQGVSPDAVTYSTVIHAFCKKGRLDDAVIKFNQMIDTGVQPKTSVYNALIQGFSTNGDLVKAKELVMEMMNKGMHPPDIKVFHSVMQNLCTEGRVTEARDILDLIVHIGMRPDVFTFTLLIGGYCLVRNMEDASKIFDDMVSYGLEPSNITYGILINGYCKNKRIDEGLILFKEMLRKGLKPTTINYNVILDGLFLAGRTVAAKEKFNEMVESGVSVCIDTYSIVLGGLCTNNCCGEAITLFQKLSKMNVKFNIRIVNIMIDAFFKVQRKQEAEDLFAAISANGLVANVFTYSLMMTNLIKEGSAEEADTLFLSMEKSGCTANSWMLNLIIRRLLKKGEIVKAGNYMAKVDAKSYSLEAKTVSLLISLFSGKGKYREHIRLLPTKYQFREEAAIVE

SEQ ID NO: 398 - protein, 430 aa, Triticum aestivum
MKSNGIAADCRVFTILIDAYAKRGMMDDAMHIFAEMREKGVSPNVVTYATVIGALCRLGRLADAMDRFNEMTDMGVQPNTAVYHSLIQGFCMHGDLGKAKELVSDMISKGIPRPNIVFFNSVINYLCKEGRIMDAQDIFELVIIIDGKPDVITFNSLIDGHCLVSKMDKAFGVLGAMLSAGIEPNVVTYNTLVNGYSRNGRIDDGLTLFRQMPRKRIKPDSATYGIILDGLFRAGRTVAARKMFHDMIESGITVSISTYNIILAGLSRNNCAEEAIDLYQKLVAMNVKFNISIINTMINAMYKVKRKEEAKDLFAAISASGLVPNASTYGVMIINILKDGAVEDANNMFSAMDRNGIAPCSRLIDSIIRILLEKGEITMAGLYLLKLDGKNMLLEASTTSLMLSLFSRKGKYKEDVKFLPAKYQFFDGFG

SEQ ID NO: 399 - protein, 430 aa, Triticum aestivum; identical to SEQ ID NO: 398

SEQ ID NO: 400 - protein, 780 aa, Triticum aestivum
MSRLRLRRSSTTPMFHILRRSSSSTSISPPSRSWSPEGAFAAATARLSTGTLSPEEAHHLFDELLRQATPVPSRSLNGFLATLARAPASAACSRDGPALALALALFNRVCAEEADPRVAPLTVHTYGILMDCCCRARRPDLGLALFARFLRTGLKTNEIIANTFLKCLCYAKRTDEAINLLLHRMPELGCVPDAISYTIVLKSLCENSMSQRALDLLQMVAEGGGACSLNVVAYSTVIHGFFKEGETGKACNLFHEMTRQGVVPNVVTYSSIIDALCKSRAMDKAELVLQQMVDSGAQPNNVTYNCMIHGYSTSGQLKEAAKMFRKMTSHGLVPNAVTCSSLMTSLCKHGRSKEAAEIFYSMTAKGHKPDAVSYRILLHGYANEGCFADMIDLFNSMKSNGIAADCRVFTILIDAYAKRGMMDDAMHIFAEMREKGVSPNVVTYATVIAALCRLGRLADAMDRFNEMTDMGVQPNTAVYHSLIQGFCMHGDLGKAKELVSDMISKGIPRPNIVFFNSVINYLCKEGRIMDAQDIFELVIIIDGKPDVITFNSLIDGHCLVGKMDKAFGVLDAMLSAGIEPNVVTYNTLVNGYSRNGRIDDGLTLFRQMPRKRIKPDSATYGIILDGLFRAGRTVAARKMFHDMIESGITVSISTYNIILAGLSRNNCAEEAIDLYQKLVAMNVKFNISIINTMINAMYKVKRKEEAKDLFAAISASGLVPNASTYGVMIINILKDGAVEDANNMFSAMDRNGIAPCSRLINSIIRILLKKVRSPWPDFIC

SEQ ID NO: 401 - protein, 780 aa, Triticum aestivum; identical to SEQ ID NO: 400

SEQ ID NO: 402 - protein, 780 aa, Triticum aestivum; identical to SEQ ID NO: 400

SEQ ID NO: 403 - protein, 430 aa, Triticum aestivum
MKSNGIAADCRVFTILIDAYAKRGMMDDAMHIFAEMREKGVSPNVVTYATVIGALCRLGRLADAMDRFNEMTDMGVQPNTAVYHSLIQGFCMHGDLGKAKELVSDMISKGIPRPNIVFFNSVINYLCKEGRIMDAQDIFELVIIIDGKPDVITFNSLIDGHCLVSKMDKAFGVLGAMLSAGIEPNVVTYNTLVNGYCRNGRIDDGLTLFRQMPRKRIKPDSATYGIILDGLFRAGRTVAARKMFHDMIESGITVSISTYNIILAGLSRNNCAEEAIDLYQKLVAMNVKFNISIINTMINAMYKVKRKEEAKDLFAAISASGLVPNASTYGVMIINILKDGAVEDANNMFSAMDRNGIAPCSRLIDSIIRILLEKGEITMAGLYLLKLDGKNMLLEASTTSLMLSLFSRKGKYKEDVKFLPAKYQFFDGFG

SEQ ID NO: 404 - protein, 780 aa, Triticum aestivum
MQTGRLSSIFTSNATSSFRAPSPQPRPPLAALAAATERARAGTLRPEEAHHLFDELLSQAAPVPERGLNNFFAALARAPPSAACGDGPALAIALFNRMSRGVGPWMASPAGCTYSILMDCCCRAGRPDLVVAFFGRLLRLGLRLEVISFNNLLKGLCHAQRTNEALDVLLHRTPELDCVPDVFSYSIVINSCFKEGEVDKACNLFHEMIQLGVQPDVAIYTSIIDALSKAGAMDKAEVVLQQMVDQGIEPDVMTYTSLIHGYSGSGQWKAAVRVFKEMASAGVLPNAFTLNSFMDSLCKHRRTKEARVIFDSMAAKGQKLNIVSYSIMLNGYAKEGCFDDMTGLLNLMLQNGVVPNHHIFNILINAYAKRGLMDEAMHMFEVMRQQGVNPDVVDYLVIMDSLCKMGRMDAALDKFNQMVNQGVSPNKAIYQCLVLGSCSHGHFVKAKELISEAINRGLFSNSVFFYPVINDLCKEGKVKEAQDMFDFILGIGQRPDVIMYNSLMDGYCLVGKVEEAVRVLDAMKSAGLQPTAVTYAILLNGYCKIGRIADGLSLFREMSLSGVKPTTIMYNIILDGLFRSGRTVSAKEKFRTMSESGIPVGIGTYNIILHGFCRSNCTDEAIELFKKLCAMNVKIDVITLNTMISVMFKTRRIEEAKDLFATISAIGLVPSVVTYSVMMTNFIKEGLLAEADDMFLAMEKAGCAPDCRLLNHVVRVLLEKGAVVKAATYLAKLDAKELSLEASTVSLIVSLFSRRGKLREHVKLLPVKYQPPEILLGTSY

SEQ ID NO: 405 - protein, 761 aa, Triticum aestivum
MPRFSSTTSMSSLRLRLRLRLHACHSSSASQPSRSQGWDPHAAFAVATECARSGNLTPEGAHNLFDELLRQGNPVLGRPLNNLLAALARAPASSSCRDGPALAVALFSRISQGARLRVVHPTACTYSILMDCCCRARHLDLALAFFGRLLRTGLKAGAIEVNILLKSLCHAKRADEAMEVLLHRMPELGCTPDSVAYNTVIHGFFKEGQVGRAMDKAEYFLREMVDNGVIPNNVTYNSLIHGYSSSGYQKEAVRVLKEMTSQGIIPDVFTCNSLMASLSKNGRSKEAAEIYDSMAMKGLEPDIVSYNTRLHGYATEGCLVDMTNLFNSMTRDGIRPNCHTLNILINAYAKFGMMDEAMLIFKGMRKQGVSPDVVTYSTVIHAFCKMGSLDIAMDKFKQMTDMGVRPNPIVYHSLIQGFCTHGDLVKAKELVTEMRNKGMRPPDIKVFHLVMQNLCTEGRVTKARDILDLIVRIGMRPDVFIFNILIGGYCLVRKMADASKIFDDMVSYGLEPSNITYGILINGYCKNKRIDDGLILFKTMLHKGLKPTTFNYNVILDGLFLAGRTVAAKEKFNEMVESGVSVCIDTCSIVLGGLCKNNCSSEAITLLRKLSTMNVKFDITIVNIIIGAFYRVKRNQEAKDLFAAIPANGLVPNAVTYTIMMTNLIKEGSVEEADNLFLSMEKSGSTANSWMLNHIIRRLLERGEIVKAGNYMSKVDVKSYSLEAKTVSLLISLFSREGKYRDHIKLLPTKYQFLEEAATVE

SEQ ID NO: 406 - protein, 363 aa, Triticum aestivum
MVDMGVRPNAIVYHSLIRGFCTHGDLVKAKELVTEMRNKAMRPPHIKFFHSIMQNLCTEGRVIEARDILDLMLHIGMRPDVPIFNLLIGGYCLVREMEDATKMFDDMVSYGLEPCNNTYGILINGYCKNRRIDDGLILFKEMLRKGLKPTTFNYNVILDGLFLAGRTVAAKVKFNEMVESGVSVCIDTYSIVLGGLCRNNCTGEAITLSKKLSTMNVKFNIAIVNILIGAFFRVRRNQEAKDLFAAIPANGLVPNAVTYTIMMTNLIKEGSVEEADTLFLSMEKSGCTANSCMLNHIIRRLLERGEIVKAGNYMSKVDAKSYSLEAKTVSLLISLLSGKGKYREHIKLLPMKYQFLEEAATVE

SEQ ID NO: 407 - protein, 759 aa, Triticum aestivum
MNIRTTRLHYIPTRLAPEFTAYSPRPMPGFSYAASMSPLRLRLHARHSASASQPSRSQGWDPHAALAVATVALFSRISQGALRRVAHPTACTYSILMDCCCRAHRPDMALAFFGRLLRTGLEADQVVFSTLLKGLCHAKRSDEALDVLLHRMPELGCTTHVVAYNTVIHGFFREGQVGKACDIFHGMAQQGVAPNVVTYNSVIDALCKARAMDKAEYFLGQMVDSGVVPNNVTYNSLIHGYSSSGHSKEAVRVLKQMTSKGIIPDVFTCNLLMASLCNNRRSKEAAELFDSMAMKGLKPNTVSYAILLHRYATEGCLVDMINLFNSMATDCILPNCRIFNILINAYAKSGKLDKAMLIFKEMHKRGVSPDVVTYSTVIHAFCKMGSLDIAMDKFNQMVDMGVRPNATVYHSLIQGFCTHGDLVKAKELVTEMRNKAMRPPDIKFFHSIMQNLCTEGRVIEARDILDLMLHIGMRPDVPIFNLLIGGYCLVREMEDATKMFDDMVSYGLEPCNNTYGILINGYCKNRRIDDGLILFKEMLRKGLKPTTFNYNVILDGLFLAGRTVAAKVKFNEMVESGVSVCIDTYSIVLGGLCRNNCTGEAITLSKKLSTMNVKFNIAIVNILIGAFFRVRRNQEAKDLFAAIPANGLVPNAVTYTIMMTNLIKEGSVEEADNLFLSMEKSGCSANSYMLNHIIRRLLEKGEMVKAGNYMSKVDAKSYSLEAKTVSLLISLFSRKGKYREHIKLLPTKYQFLEEAATVE

SEQ ID NO: 408 - protein, 363 aa, Triticum aestivum; identical to SEQ ID NO: 406

SEQ ID NO: 409 - protein, 759 aa, Triticum aestivum
MNIRTTRLHYIPTRLAPEFTAYSPRPMPGFSYAASMSPLRLRLHARHSASASQPSRSQGWDPHAALAVATVALFSRISQGALRRVAHPTACTYSILMDCCCRAHRPDMALAFFGRLLRTGLEADQVVFSTLLKGLCHAKRSDEALDVLLHRMPELGCTTHVVAYNTVIHGFFREGQVGKACDIFHGMAQQGVAPNVVTYNSVIDALCKARAMDKAEYFLGQMVDSGVVPNNVTYNSLIHGYSSSGHSKEAVRVLKQMTSKGIIPDVFTCNLLMASLCNNRRSKEAAELFDSMAMKGLKPNTVSYAILLHGYATEGCLVDMINLFNSMATDCILPNCRIFNILINAYAKSGKLDKAMLIFKEMHKRGVSPDVVTYSTVIHAFCKMGSLDIAMDKFNQMVDMGVRPNATVYHSLIQGFCTHGDLVKAKELVTEMRNKAMRPPDIKFFHSIMQNLCTEGRVIEARDILDLMLHIGMRPDVPIFNLLIGGYCLVREMEDATKMFDDMVSYGLEPCNNTYGILINGYCKNRRIDDGLILFKEMLRKGLKPTTFNYNVILDGLFLAGRTVAAKVKFNEMVESGVSVCIDTYSIVLGGLCRNNCTGEAITLSKKLSTMNVKFNIAIVNILIGAFFRVRRNQEAKDLFAAIPANGLVPNAVTYTIMMTNLIKEGSVEEADNLFLSMEKSGCSANSYMLNHIIRRLLEKGEMVKAGNYMSKVDAKSYSLEAKTVSLLISLFSRKGKYREHIKLLPTKYQFLEEAATVE

SEQ ID NO: 410 - protein, 569 aa, Triticum aestivum
MINLGVQPDAVTYSSFINALSKSGVMDKAEVVLRQMVDQGIVPNIITYTSLIHGYSTSGQWKAAVRIFKEMTSTGVRPNSVTLNSFIDSLCKHRKTKEARDIFDSMAANGHKPDIFSYSTLLNGYVKEGCFDDMTDLFNSMVWNGIVPNHHVFNILINAYAKRGLMDKAMHMFEVMRQQGVNPDVFSYQIVMDSLCKMGRMDAALDKFNQMVNQGVSPNKAVYQCLVLGSCSHGHFVKAKELISEAINRGLYSNSVFFYRVINDLCKEGKVNEAQDMFDFILGIGQRPDVIMYTSLMDGYCLVGEVEKALSVLDAMKSAGLQPDDVVYGTLLNGYCKIGRIADGLSLFREMSLSVVKPTTIIYNIILDGLFCSGRTVCAKEKFDMMIESGIPVGVDTYNIVLHGLCRNNCTDEAIELFKKLRAMNVKINVITLNTMISALFKTRRIEEAKDLFATISAIGLVPSVVTYSVMMTNFIKEGLLADADDMFSAMEKAGCAPNSRLLNQVVRVFLKNGEVVKAVTYLAKLDAKQLSLEASTVSLIVSLFSRKGKLRKHVKLLPVKYQPPEMLD

SEQ ID NO: 411 - protein, 772 aa, Triticum aestivum
MPTARLCSISASSFKASSGKPRAPVAALAAATERVRAGTLNQEDAHHLFDELLSQAAAFPVGGLNNFLATLARARPSAACSNGPALAVALFNRMSRGPGARVVSPTCCTYSILMDCCCRAGRPDLVLAFFCRLLRLGLSLNVTSFNNLLKGLCQSKRTNEALDVLLQRTPELDCAPDVVSYNIVINGCLKQGEVEKACNLYREMINLGVQPDAVTYSSFINTLSKSGAMDKAEVVLRQMVDQGIVPNIITYTSLIHGYSTSGQWKAAVRIFKEMTSTGVRPNSVTLNSFIDSLCKHRKTKEARDIFDSMAANGHKPDIFSYSTLLNGYVKEGCFDDMTDLFNSMVQNGIVPNHHVFNILINAYAKRGLMDKAMHMFEVMRQQGVNPDVFSYQIVMDSLCKMGRMDAALDKFNQMVNQGVSPNKAVYQCLVLGSCSHGHFVKAKELISEAINRGLYSNSVFFYRVINDLCKEGKVNEAQDMFDFILGIGQRPDVIMYTSLMDGYCLVGEVEKALSVLDAMKSAGLQPDDVVYGTLLNGYCKIGRIADGLSLFREMSLSVVKPATIIYNIILDGLFCSGRTVCAKEKFDMMIESGIPVGVDTYNIVLHGLCRNNCTDEAIELFKKLRAMNVKINVITLNTMISALFKTRRIEEAKDLFATISAIGLVPSVVTYSVMMTNFIKEGLLADADDMFSAMEKAGCAPNSRLLNQVVRVFLKNGEVVKAVTYLAKLDAKQLSLEASTVSLIVSLFSRKGKLRKHVKLLPVKYQPPEMLD

SEQ ID NO: 412 - protein, 772 aa, Triticum aestivum; identical to SEQ ID NO: 411

SEQ ID NO: 413 - protein, 772 aa, Triticum aestivum
MPTARLCSISASSFKASSGKPRAPVAALAAATERVRAGTLNQEGAHHLFDELLSQAAAFPVGGLNNFLATLARARPSAACSNGPALAVALFNCMSRGPGARVVSPTCCTYSILMDCCCRAGRPDLVLAFFCRLLRLGLSLNVTSFNNLLKGLCQSKRTNEALDVLLQRTPELDCAPDVVSYNIVINGCLKQGEVEKACNLYREMINLGVQPDAVTYSSFINALSKSGAMDKAEVVLRQMVDQGIVPNIITYTSLIHGYSTSGEWKAAVRIFKEMTSAGVRPNSVTLNSFIDSLCKHIKTKEARDIFDSMAANGHKPDIFSYSTLLNGYVKEGCFDDMTDLFNSMVRNGIVPNHHVFNILINAYAKRGLMDKAMHMFEVMRQQGVNPDVFSYQIVMDSLCKMGRMDAALDKFNQMVNQGVSPNKAVYQCLVLGSCSHGHFVKAKELISEAINRGLYSNSVFFYRVINDLCKEGKVNEAQDMFDFILGIGQRPDVIMYTSLMDGYCLVGEVEKALSVLDAMKSAGLQPDDVVYGTLLNGYCKIGRIADGLSLFREMSLSVVKPTTIIYNIILDGLFCSGRTVCAKEKFDMMIESGIPVGVDTYNIVLHGLCRNNCTDEAIELFKKLRAMNVKINVITLNTMISALFKTRRIEEAKDLFATISAIGLVPSVVTYSVMMTNFIKEGLLADADDMFSAMEKAGCAPNSRLLNQVVRVFLKNGEVVKAVTYLAKLDAKQLSLEASTVSLIVSLFSRKGKLRKHVKLLPVKYQPPEMLD

SEQ ID NO: 414 - protein, 772 aa, Triticum aestivum; identical to SEQ ID NO: 413

SEQ ID NO: 415 - protein, 753 aa, Triticum aestivum
  SITE 207: note = misc_feature - Xaa can be any naturally occurring amino acid
MPRFSSTTSMSSLRLRLHARHSSSASQPSHSQGWDPHAAFAAATERARSGKLTPKDAHHLFDELLRQANPVQERPLNNLLSALARAPASAACRNGPALAVNLFVRISQGARRRVAHPTACTYGILMDCCCRAHRLDLAFAFFGRLLRTGLKAGVIQVCTLLKGLCRAKRADEALDVLLHRMPELGCTPDVVAYTTVIHGFFKEGQVXKACNLFHEMALQGVTPDVVTYNSVIDALCKARAMDKAEYFLRQMIGNGVVPNNVTYNSLIHGYSSSGHWKEAVRVLKEMTSQGIIPDIVSYRILLHGYATEGCLVDMINLFNSMARYCILPDCHIFNILINAYAKSGKLDKAMLIFKEMQKQGVSPNAVTYSTVIDAFCKKGQLDDAMIKFNQMIDTGVPQGTAVYGSLIQGFCTHGNLVKAKELLTEMMNKGIPPPDIKFFHSIMQNLCTEGRVIEARDVLGLIAHIGMRPNVCTFNILIGGYCLVGKMEDASKIFDDMMSYGLEPSNITYAILINGYCKNERINDGLILFKEMLRKGLKPTTFNYNVILDGLFLAGRTVAAKEKFDEMVEFGVSVRIDTYSIVLGGLCRNNCNGEAITLFQKLSTMDVKFNITIVNIMIDAFYRVQRNQEAKDLFAAVSANGLVANVFTYTIMMKNLIKEGSVEEADDLFLSMEKSGCTADSYMLNLIVRMLLEKGELVKAGNYMSKVDAKSYSLEAETVSLLISLFSGKGKYREHIGLLPTKYQFREEAATVE

SEQ ID NO: 416 - protein, 753 aa, Triticum aestivum
MPRFSSTTSMSSLRLRLHARHSSSASQPSHSQGWDPHAAFAAATERARSGKLTPKDAHHLFDELLRQANPVQERPLNNLLSDLARAPASAACRNGPALAVNLFVRISQGARRRVAHPTACTYGILMDCCCRAHRLDLAFAFFGRLLRTGLKAGVIQVCTLLKGLCRAKRADEALDVLLHRMPELGCTPDVVAYTTVIHGFFKEGQVGKACNLFHEMALQGVTPDVVTYNSVIDALCKARAMDKAEYFLRQMIGNGVVPNNVTYNSLIHGYSSSGHWKEAVRVLKEMTSQGIIPDIVSYRILLHGYATEGCLVDMINLFNSMARYCILPDCHIFNILINAYAKSGKLDKAMLIFKEMQKQGVSPNAVTYSTVIDAFCKKGQLDDAMIKFNQMIDTGVPQGTAVYGSLIQGFCTHGNLVKAKELLTEMMNKGIPPPDIKFFHSIMQNLCTEGRVIEARDVLGLIAHIGMRPNVCTFNILIGGYCLVGKMEDASKIFDDMMSYGLEPSNITYGILINGYCKNERINDGLILFKEMLRKGLKPTTFNYNVILDGLFLAGRTVAAKEKFNEMVEFGVSVRIDTYSIVLGGLCRNNCSDEAITLFQKLSTMDVKFNITIVNIMIDAFYRVQRNQEAKDLFAAVSANGLVADVFTYTIMMKNLIKEGSVEEADDLFLSMEKSGCTADSYMLNLIVRMLLEKGELVKAGNYMSKVDAKSYSLEAETVSLLISLFSGKGKYREHIGLLPTKYKFREEAATVE

SEQ ID NO: 417 - protein, 330 aa, Triticum aestivum
MPAARLSSISTSSFRAPSRAPLAALAAATERVRAGTLSQEDAHHLFDQLLGQAAAVPERGLNNFLAALARAPPSAACRDGPGLAIALFNRMSRGAGARVASPTLCTYSILMDCCCRAGRPDLVLAFFGRLLRLGLRLDIISSSNLLKGLCQAKRSNEALDMLLHRMPELDCVPDVFSYSIVINGCFKQGEVDKACNLFHQMPQLGVQPNVVIYNSVIDALSKSGAMDKAEVVLRQMVDQGIEPNIKTYNCLIHGYSTFGQWKEALRVFKEMASLGVVPDVVTLTSLIDSLCKHRRTKEAREIFDSMAAKGLPGSGFLLSWSFCESQGFDL

SEQ ID NO: 418 - protein, 330 aa, Triticum aestivum; identical to SEQ ID NO: 417

SEQ ID NO: 419 - protein, 330 aa, Triticum aestivum
MPAARLSSISTSSFRAPSRAPLAALAAATERVRAGTLSQEDAHHLFDQLLGQAAAVPERGLNNFLAALARAPPSAACRDGPGLAIALFNRMSRGAGARVASPTLCTYSILMDCCCRAGRPDLVLAFFGRLLRLGLRLDIISSSNLLKGLCQAKRSNEALDMLLHRMPELDCVPDVFSHSIVINGCFKQGEVDKACNLFHQMPQLGVQPNVVIYNSVIDALSKSGAMDKAEVVLRQMVDQGIEPNIKTYNCLIHGYSTFGQWKEALRVFKEMASLGVVPDVVTLTSLIDSLCKHRRTKEAREIFDSMAAKGLPGSGFLLSWSFCESQGIDL

SEQ ID NO: 420 - protein, 779 aa, Triticum aestivum
MFINFANFYQIHELFRQIHKKIQIDGKKFNFANFFQIVNFLLNSWTFFFLQVHGIDAPAARALVATWWQKFAGLQLTREENVMHPSDPIFGAPWGSRNSIDKSAAHLMGVSITRKDSSENHQVPLYPKHTPPPPPDSSAAYEAAHRRASPPVPPPAFTSSAAALVAARAPSVAGDTNRSRCASSADARTSRVELGWNRPEMPAARLSSISTSSFRAPSRAPLAALAAATERVRAGTLSQEDAHHLFDQLLGQAAAVPERGLNNFLAALARAPPSAACRDGPGLAIALFNRMSRGAGARVASPTLCTYSILMDCCCRVGRPDLVLAFFGRLLRLGLRLDIISSSNLLKGLCQAKRSNEALDMLLHRMPELDCVPDVFSYSIVINGCFKQGEVDKACNLFHQMPQLGVQPNVVIYNSVIDALSKSGAMDKAEVVLRQMVDQGIEPNIKTYNCLIHGYSTFGQWKEALRVFKEMASLGVVPDVVTLTSLIDSLCKHRRTKEAREIFDSMAAKGLKPNIVSYSTMLNGYVKEGSFEDMTDLFNSMVRNGVVPNHHIFNILINAYAKRGLMDEAMHMFEVMRQQGVNPDVVDYLVIMDSLCKMGRMDAAVDKFNQMVNQGVSPNKAVYQCLVLGSCSHGHFVKAKDLISEAINRGLFSNSVFFYPVINDLCKEGKVNEAQDMFDFILGIGRRPDVIMYNSLMDGYCLVGKVEEALRVLDAMKSAGLQPTAVTYAILLNGYCKIGRIADGLSLFREMSLSGVKPTTFINNNNNNKAFSPKQVGVG

SEQ ID NO: 421 - protein, 765 aa, Triticum aestivum
MPTARLSSISTSSFRAPLAALAAATERVLAGTLSREDAHHLFDELLGQAAAAPEHGLNNFLAALARAPPSAACSDGPGLAIALFNRMSRGAGARVVSPTLCTYSILMDCCCRARRPELVVAFFGRLLRLGLRLDIISSSNLLKGLCQAKRSNEALDMLLHRMPELDCAPDVFSFNIVINGCFKEGEVDKACNLFHEMPQLGVQPDVVTYTSIINALSKSGAMDKAEVVLRQMVDQGIGPNIRTYTSLIHGYSASGQWKAAARVFKEMVSLGVLPNVVTWNSFMDSLCKHRRTKEARDIFDSMAAKGQKPDIVSYSIMLNGYAKEGYFDDMTDLFNSMLQNGIVPNHHVFNILINAYAKRGLMDEAMHMFEVMRQQGVNPNVVSYQVIMDSLCKMGRMDAALEKFNQMVNQGVSADKAVYRCLVLGSCSHGDFVKAKELISEAVNRGLCSNSVFFYSVINDLCKEGKVKEAQDMFHFIVGIGQRPDVIMYTSLMDGYCLVGKVEEALRVLDAMKSAGLQPTAVTYAILLNGYCKIGRIADGLSLFKEMSLSGVKPTTIMYNIILDGLFRSGRTVSAKEKFCTMSESGIPVGIDTYNIVLSGLCKNNCTGEAIELFKKLRAMNVKIDVITLNIMISAMFKTRRIEEAKDLFATISAIGLVPSVVTYSLMMTNFIKEGLLAEADDMFLAVEKANCAPNSRLLNHVVRVLLEKGAVVKGANYLAKLDAKQMSLDVSTISLIVSLFSGEGKLREHVKLLPVKYQPPENSG

SEQ ID NO: 422 - protein, 765 aa, Triticum aestivum
MPTARLSSISTSSFRAPLAALAAATERVRAGTLSREDAHHLFDELLGQAAAAPEHGLNNFLAALARAPPSSACSDGPGLAIALFNRMSRGAGARVVSPTLCTYSILMDCCCRARRPELVVAFFGRLLRLGLRLDIISSSNLLKGLCQAKRSNEALDMLLHRMPELDCAPDVFSFNIVINGCFKEGEADKACNLFHEMPQLGVQPDVVTYTSIINALSKSGAMDKAEVVLRQMVDQGIGPNIRTYTSLIHGYSASGQWKAAARVFKEMVSLGVLPNVVTWNSFMDSLCKHRRTKEARDIFDSMAAKGQKPDIVSYSIMLNGYAKEGYFDDMTDLFNSMLQNGIVPNHHVFNILINAYAKRGLMDEAMHMFKVMRQQGVNPNVVSYQVIMDSLCKMGRMDAALDKFNQMVNQGVSPDKAVYRCLVLGSCSHGDFVKAKELISEAVNRGLCSNSVFFYSVINDLCKEGKVKEAQDMFHFIVGIGQRPDVIMYTSLMDGYCLVGKVEEALRVLDAMKSAGLQPTAVTYAILLNGYCKIGRIADGLSLFKEMSLSGVKSTTIMYNIILDGLFRSGRTVSAKEKFCTMSESGIPVGIDTHNIVLSGLCKNNCTGEAIELFKKLRAMNVKIDVITLNIMISAMFKTRRIEEAKDLFATISAIGLVPSVVTYSLMMTNFIKEGLLAEADDMFLAVEKANCAPNSRLLNHVVRVLLEKGAVVKGANYLAKLDAKQMSLDVSTISLIASLFSGEGKLREHVKLLPVKYQPPENSG

SEQ ID NO: 423 - protein, 571 aa, Triticum aestivum
MPQLGVQPDVVTYNSIIDALSKSGAMDKAEVLLRQMVDQGIEPNIRTYSCLIHGYSTFGQWKEALRVFKEMASLGVAPDVVTLSSLIDSLCKHRRTKQAREIFDSMAAKGLKPDIVSYSTMLNGYVKEGSFEDMTDLFNSMVRNGIVPNHHVFNILINAYARRGLMDEAMHMFEVMRQQGVNPDVVSYLVVMDSLCKMGRMDAALDKFNQMVNQGVSPNKAVYQCLVLGSFSHGDFVKAKELISEAVNRGMCSNSVFFYPVINDLCKEGKVKEAQDMFDFILGIGQRPDVIMYTSLMDGYCLVGKVEKALSVLDAMKSAGLQPDDVVYATLLNGYCKIGRIADGLSLFREMSLSGVKPTTIIYNIILDGLFCSGRTGFAKEKFHTMTESGIPVGVDTYNIVLSGLCRNNCTDEAIELFKKLRATNVKIDVMTLNIMISAMFKTRRIEEAKDLFATISAIGLVPSVVTYSLMMTNFIKEGLLADADDTFLVMEKAGCAPNSSLLNQVVRVLLEKGAVVKAATYLAKLDAKQLSVEASTISLIVSLFSGEGKLREHVELLPVKYQPPQSSADN

SEQ ID NO: 424 - protein, 715 aa, Triticum aestivum
MSRRVVPVGRRILEQNIKGRYRTGHIGTVDALHLFDELLQVAQPSSIAAINCLLTVFGRDCPALGVSLFNRVARTKVPLQSVTYGILVNCCCGAGRLDLGFAAMGNIIKMGFMKESVVAFSHLLKAICAENKTSYAMDIVLRVMPELNCTPNIFSYSILFKGLCNDKRSQEALDLIHIMVEHGGSCQPNVVSYSTVIDGLLKEGEVNKAYSLFCEMLQRGISPDVVTCSSIISGMCKLHAMDKAEDVLQQMLDRGILPDVATYTSLMHGYYSLGQCEEVDRIFKEMSRNGVQPDIVTYNIQMDYLCKSGRCAEARKIFDSMVSLGQKPDVTTYNVLLHGYAMERSFHDMNCLIELMDDNGISPDHYGYNILISAYAKEKMVDEVMHIFTKMRQQGLNPDVANYGAAVNLLSKIGRMDDAMSQFNQMITEGLAPDIIVFTPLISGFCSCGKWEKVDELFSEMLDRGICPNTVFFNTIMDRLCKNGRVMEAQDLFDLMVHMGVKPDVCTYNTLIGGYLFVGKMDEVSKLLDNMVSIGMEPDVITYNILIDGYSKNGRIDDALVVFREMLDRKVKPCVITFNSMIGALLKCGRKAEAKDLFDGIWANGLVPDVITYSLMIQKLIEEGSLQESDDLFLSMEKNGCAADSRMLNSMVRSLLQKGEVPRAGTYLSKIDERRFTFEASTASLLAALASGGKSQEYKELLPEKYHYFLEQGTD

SEQ ID NO: 425 - protein, 715 aa, Triticum aestivum; identical to SEQ ID NO: 424

SEQ ID NO: 426 - protein, 715 aa, Triticum aestivum; identical to SEQ ID NO: 424

SEQ ID NO: 427 - protein, 741 aa, Triticum aestivum
MPRFSSTTPMSPPRLLLRLGARHSSSTSHPSRIWDPHAAFAAATQRARSGTLTTEDAHHLFDELLRQGNPVQERPLTNFLAALARAPASAFCSDGPALAVALFGRLSRGAGRRVAQPNVFTYGVLMDCCCRARRLDLAIAFFARLLKTGLEANQVIFCTLLKGLCHAKRSDEALDVVLHRMPELGCTPNVVAYTTVIHGFLKEGQVGKACNLFHGMAQQGVAPDVVTYNSVIDALCKARAMDKAEYFLCEMVDNGVVPNNVTYNSLIHGYSSLGHQKEAVRVLKEMTRQGIIPDVITCTSLMTFLCKNGKSKEAAEIFDSMPTKGLKHDAVSYAILLHGYATEGCLVDMINLFNSMDRDCILPNCHIFNILIYAYAKSGKLDKAMLIFRDMQKQGVSPDAVTYSTVIHAFCKKGRLDDAVIKFNQMIDTGVRPEASAYRSLIQGFCTHGDLVKAKEYVTEMMKKGMLPPDIMFFSSIMQKLCTEGRVIEARDILDLIVRIGMRPNVFIFNILIGGYCLVCKMEDATKMFEDMVSFGLEPCNITYGILINGYCKNRRIDDGLILFQEMLHKGLKPTTFNYNVILDGLFLAGRTVAAKEKFDEMVESGVSVCSDTYSIVLAGLCRNNCSSEVIMLFQKLRAMNMKFNIRIVTIMIDAFYKVRRNQEAKDLFAAIPSNGLVANVVTYSIMMKSLIKEGSVEEADTLFIDGEERLYCKLLDVKSYYQKVTGKRRDSQGWKLYVES

SEQ ID NO: 428 - protein, 741 aa, Triticum aestivum; identical to SEQ ID NO: 427

SEQ ID NO: 429 - protein, 741 aa, Triticum aestivum
MPRFSTTTPMSPPRLLLRLGARHSSSTSHPSRIWDPHAAFAAATQRARSGTLTTEDAHHLFDELLRQGNPVQERPLTNFLAALARAPASAFCSDGPALAVALFGRLSRGAGRRVAQPNVFTYGVLMDCCCRARRLDLAIAFFARLLKTGLEANQVIFCTLLKGLCHAKRSDEALDVVLHRMPELGCTPNVVAYTTVIHGFLKEGQVGKACNLFHGMAQQGVAPDVVTYNSVIDALCKARAMDKAEYFLCEMVDNGVVPNNVTYNSLIHGYSSLGHQKEAVRVLKEMTRQGIIPDVITCTSLMTFLCKNGKSKEAAEIFDSMPTKGLKHDAVSYAILLHGYATEGCLVDMINLFNSMDRDCILPNCHIFNILIYAYAKSGKLDKAMLIFRDMQKQGVSPDAVTYSTVIHAFCKKGRLDDAVIKFNQMIDTGVRPEASAYRSLIQGFCTHGDLVKAKEYVTEMMKKGMLPPDIMFFSSIMQKLCTEGRVIEARDILDLIVRIGMRPNVFIFNILIGGYCLVCKMEDATKMFEDMVSFGLEPCNITYGILINGYCKNRRIDDGLILFQEMLHKGLKPTTFNYNVILDGLFLAGRTVAAKEKFDEMVESGVSVCSDTYSIVLAGLCRNNCSSEVIMLFQKLRAMNMKFNIRIVTIMIDAFYKVRRNQEAKDLFAAIPSNGLVANVVTYSIMMKSLIKEGSVEEADTLFIDGEERLYCKLLDVKSYYQKVTGKRRDSQGWKLYVES

SEQ ID NO: 430 - protein, 741 aa, Triticum aestivum; identical to SEQ ID NO: 429

SEQ ID NO: 431 - protein, 310 aa, Triticum aestivum
MPELGCTPDVVAYSTVIHGFFKEGQVGKACNLFHGMAQQGVAPDVVTYNSVIDALCKARAMDKAEYFLGQMVDSGVVPNNVTYNSLIHGYSSSGHSKEAVRVLKDMTSKGIIPDVFTCNSLMASLCKNGRSKEAAEIFNSMSMKGLKPNTISYAILLHGYATEGCLVDMINLFNSMATDCILPNCHIFNILINAYAKYGKLDKAMLIFKDMQKQGVSPDAVTYSTVIHAFCKKGRLDDAVIKFNQMIDTGVLLEASVYRSLIQGFCTHGDLVKATEYVTEMMKKGMLPPDIMFFSSIMQNLCTEGRVIEA

SEQ ID NO: 432 - protein, 715 aa, Triticum aestivum
MSRRLVPVGRRILEQNIKAWYHAGDIGTKDALHRFDELLQDAGSSSIRAVNYLLTVVGRDCPALGVSLFNRVARAKVAPNSITYTILVDCCCRAGRLDLGFAAMGHIIKMGFTADAIFSFSHLLKSICAEKKTSYAMDIVLRVMPELNCTPDIFSYSILFKGLCNEKRSQEALELIHIMVEDGGCCRPDVVSYSTVIDGLLKEGEVDKAYGLFCEMLQRGISPDDVTYNSIISGMCKVHAMDKAEEVLQQMFDRGILPDVATYNSLIHGYYSLGRCKEVDRIFKEMSRNGVQPDIVTYNIQMDYLCKNGRCTEARKIFDSIVSLGQKPTVTTYSILLHGYALERSFHEMHCLIDLMVGNGIAPDHFVYNILISAYAKEEMIGEVMHIFKKMRQHGLNPDVANYGAVVNLLSKIGRMDDAMSQFNQMITEGLAPDIIIFTPLISGFCSCGKWEKVHELFSEMLDRGICPNTVFFNTIMDRLCKNGRVMEAQDLFDLMVHMGVKPDVCTYNKLTGGYLFIGKMDEVSKLLDNMVSIGMEPDVITYNILIDGYSKNGKINDALVFFREMLEGKVKPSVIIFNIMIGVLLKCGRKEEAKDLFDGIWAKGLVPDVVTYSLMIQKLIEEGSLQESNDLFLSMEKNGCAADSRMLNAIVRSLLQKGEVPRAGTYLSKIDERRFTLEASTASLLTALVSGGKGQEYKELLPEKYHSFLEQGTD

SEQ ID NO: 433 - protein, 715 aa, Triticum aestivum; identical to SEQ ID NO: 432

SEQ ID NO: 434 - protein, 715 aa, Triticum aestivum; identical to SEQ ID NO: 432

SEQ ID NO: 435 - protein, 715 aa, Triticum aestivum; identical to SEQ ID NO: 432

SEQ ID NO: 436 - protein, 715 aa, Triticum aestivum; identical to SEQ ID NO: 432

SEQ ID NO: 437 - protein, 715 aa, Triticum aestivum; identical to SEQ ID NO: 432

SEQ ID NO: 438 - protein, 733 aa, Triticum aestivum
MRRRLVTVGRRILEQKIQDRHRAGDIGRRILEQNIKARYHAGDIGTEDALNLFDELIQVAQPSSIRAINCLLTVVGRDCPALGVSLFNRVARAKVPPHNITYGILVDCCCRAGRLDLGHAAMGHVIKLGFTAEAIINFSHLLKAICAVKKTSYAMDIVLRVMPEFNCTPNIFSYSILFKGLCNERRSQEALELINIMVEDGGSCQPDVVTYNTVIDGLLKEGEVDQAYSLFSEMLRQGVSPNVVTCNSIISGMCKLHAMDKAEEVLQQMLDRRILPDVATYNSLIHGYYSLGQCEEVDRIFKEMTTNGVQPDIVTYNIQMDYLCKNGRCAEARKIFDSMISLGQKPTVTTYNILLHGYAMERSFHDMNCLIELMDDNGISPDHYGYNILISAYAKEKMVDDVLHIFTKMRQQGLNPDVANYGAVINLLSSIGRMDDAMSQYNQMINEGLAPDIIVFNSLISGFYSCGKWEKVHELFSEMLDRGICPNTVFLNTIMDRLCKNERVMEAQDLFDLMVHMGVKPDVWTYNTLIGGYLFVGKMDEVRKLLDNMCSIGMEPDVVTYSILIDGYSKNGRIDDAFVVFKELLGGKVKPCVITFTIMIGALLKCGRKEEAKDLFDGIWANGLVPNVITYSLMIQNLIEEGSLQESDDLFLSMEKNGCAADSRMLNAIVRRLLQRGEMPRAGTYLSKIDEGSFTLEASTAGLLTALASGGKCQEYKGLLPEKYHSFLEQGTG

SEQ ID NO: 439 - protein, 733 aa, Triticum aestivum; identical to SEQ ID NO: 438

SEQ ID NO: 440 - protein, 715 aa, Triticum aestivum
MRRRLVPVGSRLSERNIEHRYRSRNIGTEDALNLFDELIQVAGPSSVRAINCLLTVVGRDCPAIGVSLFNRVARAKVPPHNITYGILVDCCCRAGRLDLGHAGMGHVIKLGFAAEAIVNFSHLLKAICAEKKTSYAMDIVLRIMPEFNCIPNIFSYSILLKGLCNEKRSQEALELIHMMIDHGGSCQPNVVSYSTVLDGLLKEGEVGKAYSLFCVMLQRGISPNAVTCTSIISGMCKVHAMDKAEEVLQQMTNRGILPNSATYNSLIHGYYSLGWCKEVDRILKEMSKNGVQPDIITSNIQLDYLCKSRRCAEARKIFDSMVSLGQKPDVTTYSILLHGYAMEKSFHDMLCLIDLMVGNGIAPNHYVYNILISAYAKEEMVDEVMHIFTKMRQKGLNPDAVSYGTVIDLLSRIGRMDDAMSQFAQIITEGLAPDIIVFNSLISGFCSCGKWEKVHELFSEMLDHGICPDRVFFNTVMDHLCKNGRVMEAQDVFDLMVHMGVKPFVRDYNTLIHGYCLVGKMDEGRKLLDNMFSIGLKPDDFTYSILIDGYSKKGRIDDALIIVREMLDGKVKPSIITFNIMIGALLKGGRKEEAKDLFDGIWAKGLVPDVVTYSLMIQKLIEEGSLQESDDLFISMEKNGCAADSQMLNAIVRSLLQKGEVPRAGTYLSKIDERRFTPEASTASLLTALVSEGKGQEYKELLPEKYHSFLEQGTD

SEQ ID NO: 441 - protein, 714 aa, Triticum aestivum
MRRRLVPVGSRLLERNIEHRYRSRNIGTEDALNLFDELIQVAGPSSVRAINYLTVVGRDCPAIGVSLFNRVARAKVPPHNITYGILVDCCCRAGRLDLGHAGMGHVIKLGFAAEAIVNFSHLLKAICAEKKTSYAMDIVLRIMPEFNCIPNIFSYSILLKGLCNEKRSQEALELIHMMIDHGGSCQPNVVSYSTVLDGLLKEGEVGKAYSLFCVMLQRGISPNAVTCTSIISGMCKVHVMDKAEEVLQQMTDRGILPNSATYNSLIHGYYSLGWCKEVDRILKEMSRNGVQPNVVTYNIQLDYLCKSRRCAEARKIFDSMVSLGQKPDVTTYSILLHGYAMEKSFHDMLCLIDLMVGNGIAPNHYVYNILISAYAKEEMVDEVMHIFTKMRQKGLNPDAVSYGTVIDLLSRIGRMDDAMSQFAQIITEGLAPDIIVFNSLISGFCSCGKWEKVHELFSEMLDRGICPDRVFFNTVMDHLCKNGRVMEAQDVFDLMVHMGVKPFVRDYNTLIHGYCLVGKMDEGRKLLDNMFSIGLKPDDFTYSILIDGYSKKGRIDDALIIVREMLDGKVKPSIITFNIMIGALLKGGRKEEAKDLFDGIWAKGLVPDVVTYSLMIQKLIEEGSLQESDDLFISMEKNGCAADSQMLNAIVRSLLQKGEVPRAGTYLSKIDERRFTPEASTASLLTALVSEGKGQEYKELLPEKYHSFLEQGTD

SEQ ID NO: 442 - protein, 714 aa, Triticum aestivum; identical to SEQ ID NO: 441

SEQ ID NO: 443 - protein, 715 aa, Triticum aestivum
MRRRLVPVGSRLLERNIEHRYRSRNIGTEDALNLFDELIQVAGPSSVRAINCLLTVVGRDCPAIGVSLFNRVARAKVPPHNITYGILVDCCCRAGRLDLGHAGMGHVIKLGFAAEAIVNFSHLLKAICAEKKTSYAMDIVLRIMPEFNCIPNIFSYSILLKGLCNEKRSQEALELIHMMIDHGGSCQPNVVSYSTVLDGLLKEGEVGKAYSLFCVMLQRGISPNAVTCTSIISGMWKVHAMDKAEEVLQQMTNRGILPNSATYNSLIHGYYSLGWCKEVDRILKEMSKNGVQPDIITYNIQLDYLCKSRRCAEARKIFYSMVSLGQKPDVTTYSILLHGYAMEKSFHDMLCLIDLMVGNGIAPNHYVYNILISAYAKEEMVDEVMHIFTKMRQKGLNPDAVSYGTVTDLLSRIGRMDDAMSQFAQIITEGLAPDIIVFNSLISGFCSCGKWEKVHELFSEMLDHGICPDRVFFNTVMDHLCKNGRVMEAQDVFDLMVHMGVKPFVRDYNTLIHGYCLVGKMDEGRKLLDNMFSIGLKPDDFTYSILIDGYSKKGRIDDALIIVREMLDGKVKPSIITFNIMIGALLKGGRKEEAKDLFDGIWAKGLVPDVVTYSLMIQKLIEEGSLQESDDLFISMEKNGCAADSQMLNAIVRSLLQKGEVPRAGTYLSKIDERRFTPEASTASLLTALVSEGKGQEYKELLPEKYHSFLEQGTD

SEQ ID NO: 444 - protein, 714 aa, Triticum aestivum; identical to SEQ ID NO: 441

SEQ ID NO: 445 - protein, 634 aa, Triticum aestivum
MPTARLSSVSASSFKASSRKPRAPLAALAAATERVRAGTLSQEDAHHLFDELLGQAAIVPERGLNNFLAALARAPPSGACGDGPTLAVTLFNRMSRGAGARVVSPTLCTYSILMDCCCRAGRPDLVVAFFGRLIRLGLRLEIISFSNLLKGLCQAKCSNEALDMLLHRMPELDCAPHVVSYNIVINGCFKQGEVEKACNLYREMINLGVQPNVVTYSSFINALSKSGAMDKAEVVLRQMVDQGIAPNIITYTSLIHGYSTSGQLKAAVSIFKEMASAGVRPNSVTLNSFIDSLCKHRKTKEARDIFDSMAAKGHKPDIFSYSTMLNGYAKEGCFDDMTDLFNSMVRNGIVPDHHVFNILINAYAKRGLMDKAMHMFEVMRQQGVNPNVVDYGILLNGYCKIGRIAHGLSLFREMSLSGVKPTTIMYNIILDGLFRSGRSVSAKEKFDMMLESGIPVNVRTYNIVLCGLCKNNCTGEAMELFKKLRAMNVQIDVMILNTMISAMFKTRRIEEAKDLFATISAIRLVPSVVTYSVMMTNFIKEGLLADADDMFLEMEKAGCAPNSSLLNQVVRALLEKGAVVKAATYLAKLDAKQLSVEASTILLIVSLFSGEGKLREHIELLPVKYQPPESSTDN

SEQ ID NO: 446 - protein, 729 aa, Triticum aestivum
MVPPSPSPSSTACAENKPARGWHLTVHTYGILMDCCCRASRPDLGLAFFGRLLRTGLKTNEIVASTFLKCLCYTKRTEEAGNLLLHRMPELCCVPDAFSYNIVLKSLCDNSMSQRGLDLLQMMAKEGGGCSPNVVAYSTVIHGFFKEGETGKACNLFHEMMQQGVVPNVWTYSSIIDALCKARAMDKAELALQQMVANGAQPNEVTYNCMIHGYSTSGRLKEAAKMFREMKSRGLTPNIVTCGSLMTSLCKHGRSKEAREIFDSMTAKGHRADVVSYSILLHGYANEGCFADMIDLFNSMESNGIAADCRVFTILIDAYAKRGMMDDAMHIFTEMQQQGVSPNVVTYSTVISALSRMGRLTDSMEKFNQMVALGVQPDRAIYRSLIQGFCMHGGLVKDKELVSQMINKGIPRPSIVFFNSVINSMCKEGRVMDAHDIFDLVIDIGERPDDITFNSLIDGYCLVGKMDKAFKILDAMESVGVQPNIVTYNTLLDGYFKNGRINDGLTLFREMPRKRIKPDTVTYGIMLDGLFRAGRTVAARTMFHEMIESGITVDIPTYNIVLRGLSRNNCTDEAIALFQKLGAMSVKFNISIFNTMIDAMYKVRRREEANDLFAAISASGLVPKESTYAVMIINLLKHGAVEEADNMFSSMEKTGIVPSSRLLNCIIRMLLEIGEIAKAGNYLSKLDGNSISLEASTTSLMLSLFSKKGKYHEDMKLLPAKYQFFDGCS

SEQ ID NO: 447 - protein, 716 aa, Triticum aestivum
MFSVFIFALVFYVHLAIALFNRMCREQSGPRVVPLTVHTYNILMDCCCRASRPDLGLAFFARLLRTGLKTNEITANTFLKCLCYARRTDEALNVLLHRMFELGCVPDAISYNIVLKSLCEDSMSQRALDLLQMMAKEGGGCSPNVVAYSTVIHGFFKEGETGKACNLFHEMMHQGVEPSVWTYSSIIDALCKARAMDKAELVLQQMVNKGVLPNNVTYNCMIHGYSTSGQWKEAAKLLREMKSRDLIPDIVTRNSFLASLCKHGRSKEAAEFLDSMTAKGHKPDIVSYRILFHGYASEGCFADMIDLFNSMESNGIAADCHVFNILISGYAKRGMTEEAMLIFTEMRGQGVSPDVVTYSIVIAALSRMGRLTDAIEKFNEMTALEVHPDTTVYHSLIQGCCIDGDLVKAKELMLEMMNGGILRPNIVFFNSVINSLCKEGRVMDAHDVLDLVIGIGERPDTITFSSLIDGYCLVGKTDKAFKILDAMESVGVEPDIVTYNTLLDGYFKNRRIDDALTLFREMPRKRIKPGTVTYGIMLDGLFRAGRTVAAKKMFHEMNGSGTTVDISTYAIILGGFCRNNCADEAITLFHKLGAMNVKFNIAIVNTMINAMYKVGRREEAKELFAGILARGLVPNESTYGVMIKNLLKDGAVEDANNVFSSMDKSGIVPSSRLINDIIRLLLEKGNEKNSALQNIARPFSKCYTSYSALIACYISK

SEQ ID NO: 448 - protein, 716 aa, Triticum aestivum
MFSVFIFALVFYVHLAIALFNRVCREQSGPRVVPLTVHTYNILMDCCCRASRPDLGLAFFARLLRTGLKTNEITANTFLKCLCYARRTDEALNVLLHRMSELGCVPDAISYNIVLKSLCEDSMSQRALDLLQMMAKEGGGCSPNVVAYSTVIHGFFKEGETGKACNLFHEMMHQGVEPSVWTYSSIIDALCKARAMDKAELVLQQMVNKGVLPNNVTYNCMIHGYSTSGQWKEAAKLLREMKSQDLIPDIVTRNSFLASLCKHGRSKEAAEFLDSMTAKGHKPDIVSYRILFHGYASEGCFADMIDLFNSMESNGIAADCHVFNILISGYAKRGMTEEAMLIFTEMRGQGVSPDVVTYSIVIAALSRMGRLTDAIEKFDEMTALEVHPDTTVYHSLIQGCCIDGDLVKAKELMLEMMNGGILRPTIVFFNSVINSLCKEGRVMDAHDVLDLVIGIGERPDTITFSSLIDGYCLVGKTDKAFKILDAMESVGVEPDIVTYNTLLDGYFKNRRIDDALTLFREMPRKRIKPGTVTYGIMLDGLFRAGRTVAAKKMFHEMNESGTTVDISTYAIILGGFCRNNCADEAITLFHKLGAMNVKFNIAIVNTMINAMYKVGRREEAKELFAGILARGLVPNESTYGVMIKNLLKDGAVEDANNVFSSMDKSGIVPSSRLINDIIKLLLEKGNEKNSALQNIARPFSKCYTSYSALIACYISK

SEQ ID NO: 449 - protein, 716 aa, Triticum aestivum; identical to SEQ ID NO: 447

SEQ ID NO: 450 - protein, 716 aa, Triticum aestivum; identical to SEQ ID NO: 447

SEQ ID NO: 451 - protein, 716 aa, Triticum aestivum; identical to SEQ ID NO: 448

SEQ ID NO: 452 - protein, 716 aa, Triticum aestivum; identical to SEQ ID NO: 447

SEQ ID NO: 453 - protein, 733 aa, Triticum aestivum
MSRLRHSTSTAPMFHLRLLRCRFSSIPISPPSRSWSPVTAFAAATERVSAGTLSPEDAHRLFDELLRQATPVPARSLNGLLTALSRAPDTGACRDGPALALALFNRTRREEAGSWVVPSTIFTYGILMNCCCRTRRPELGLAFFGRVLRMGLRTNVVVATTVLQCLCGAKRTDEAVDILLHRMSELGCVPDDFSYNIVLKSLCDDSRSQRALDLLRMWENERGVCSPNVYTYNTVIHGFFKEGEVSKACNLFHEMAQKGVPPNVVTYSLTIDALCKARAMDKAQLFLRQMIHKGVRPNNVTYNVMIHGYCTLGQWKEAGKMFREMTRQGLIPDIVTWTSFMASLCKHGRTKEAAEFFDSMTAKGHKPDLVMYHVLLHGYATEGCFADMINLFNSMATKGIVPDRQVFNILIDAHAKHGMMDEAMHIFTGMQGQGVCPDVGTYSTLISALCRMGRLADAMDNFSQMIGKGVQPNTVVYHSLIQGFSTHGDLRKAKELVYEMTNKGIPCPNIAFFSSIMDSLCKEGRVMDAHDIFHLVTDIGLKPNIITFNTLIDGHCLVGEMEKAFGVLDSMVSAGIEADVFTYNTLAYGYCRCGRIDDGLILFREMLQNKPKPTTITYNIILDGLFRAGRTFAAKKMFLEMIETGITVSISTYSIILGGLCRNNCSDEAITLFQKLGAMNVKFDIKILTTMINAMFKVWRREEANGLFAAISASGMVPNADRKSSKRRISGRS

SEQ ID NO: 454 - protein, 733 aa, Triticum aestivum; identical to SEQ ID NO: 453

SEQ ID NO: 455 - protein, 733 aa, Triticum aestivum; identical to SEQ ID NO: 453

SEQ ID NO: 456 - protein, 733 aa, Triticum aestivum; identical to SEQ ID NO: 453

SEQ ID NO: 457 - protein, 733 aa, Triticum aestivum; identical to SEQ ID NO: 453

SEQ ID NO: 458 - protein, 733 aa, Triticum aestivum; identical to SEQ ID NO: 453

SEQ ID NO: 459 - protein, 716 aa, Triticum aestivum
MSRRLVPVGRRILEQNIKDRYRTGHIGTEDALQLFDELLQVAQPSSIAAINCLLTVVGRDCPALGVSLFNRVARSKVAPSSITYAILVDCCCRAGRQDLGHTAMGHVIKMGFLADAIITFSHLLKAICAENKTSYAMDIVLRVMPMFNCVPSIFSYSILFKGLCNERRSQEALELINIMVEDGRGSCQPNVVSYTTVIDGLLKEGEVGKAYSLFCVMLQRGISPNVVTCTSIISGMCKVHAMDKAEEVLQQMTNRGILPNSATYNSLIHGYYSLGQCEEVDRILMEMSRNGVQPNVVTYNIQMDYLCKSGRCAEARKIFDSMISLGPKPTITTYNILLHGYAMEKSFHDMHSLIDLMVGNGIAPDHYVYNILISACAKEEMVSEVMHIFKKMRQHGLNPDVATYGAVVNLLCSMGRMDDAMYQYNQMITEGLAPDIIVFSTLISGFCTCGKWEKVHELFSEMLDRGICPNTVFFTTIMDRLCKNGRVMEAQDLFDLMVHMGVKPDVCTYNTLIGGFLFIGKMDEVRKLLDNMVSIGMKPDVITYNILIDGYCKNGRIDDALVVFREMLAGKVKPCIITFNIMLGALLKGGRKEEAKDLFDGIWAKGLVPTVVTYSLMIQKLIEEGSLQESDDLFLSMEKNGCPANSRMLNAIVRRLLQKGEMPRAGTYLSKIDERSFTIEASTASLLTALASVGKCQEYKGLLPEKYHSFLEQGTD

SEQ ID NO: 460 - protein, 716 aa, Triticum aestivum
MSRRLVPVGRRILEQNIKDRYRTGHIGTEDALQLFDELLQVAQPSSIAAINCLLTVVGRDCPALGVSLFNRVARSKVAPSSITYAILVDCCCRAGRQDLGHTAMGHVIKMGFLADAIITFSHLLKAICAENKTSYAMDIVLRVMPMFNCVPSIFSYSILFKGLCNERRSQEALELINIMVEDGRGSCQPNVVSYTTVIDGLLKEGEVGKAYSLFCVMLQRGISPNVVTCTSIISGMCKVHAMDKAEEVLQQMTNRGILPNSATYNSLIHGYYSLGQCEEVDRILMEMSRNGVQPNVVTYNIQMDYLCKSGRCAEARKIFDSMISLGPKPTITTYNILLHGYAMEKSFHDMHSLIDLMVGNGIAPDHYVYNILISACDKEEMVSEVMHIFKKMRQHGLNPDVATYGAVVNLLCSMGRMDDAMYQYNQMITEGLAPDIIVFSTLISGFCTCGKWEKVHELFSEMLDRGICPNTVFFTTIMDRLCKNGRVMEAQDLFDLMVHMGVKPDVCTYNTLIGGFLFIGKMDEVRKLLDNMVSIGMKPDVITYNILIDGYCKNGRIDDALVVFREMLAGKVKPCIITFNIMLGALLKGGRKEEAKDLFDGIWAKGLVPTVVTYSLMIQKLIEEGSLQESDDLFLSMEKNGCPANSRMLNAIVRRLLQKGEMPRAGTYLSKIDERSFTIEASTASLLTALASVGKCQEYKGLLPEKYHSFLEQGTD

SEQ ID NO: 461 - protein, 716 aa, Triticum aestivum; identical to SEQ ID NO: 460

SEQ ID NO: 462 - protein, 716 aa, Triticum aestivum; identical to SEQ ID NO: 460

SEQ ID NO: 463 - protein, 612 aa, Triticum aestivum
MGHVIKLGFTAEAIVNFSHLLKAICAVKKTSYAMDIVLRIMPEFNCIPNIFSYNILFKGLCNEKRSQEALDLIRIMVEHGGCCQPDVVTYNTVIDGLLKEGEVGKAYSLFCEMLRQGVSPDVVTCSSIISGMCKLHAMDKAEEVLQQMLDRRILPDVATYNSLIHGYYSLGQCEEVDRIFKEMTTNGVQPDIVTYNIQMDYLCKNGRCAEARKIFDSMISLGQKPTVTTYNILLHGYAMERSFHDMNCLIELMDDNGISPDHYGYNILISAYAKEKMVDDVLHIFTKMRQQGLNPDVANYGAVINLLSSIGRMDDAMSQYNQMINEGLLPGIILFSQLISGFCSCGKWEKVHELFSEMLDRGICPNTVFFNTIIDRLCKNGRVMEAQDLFDLMVHMGVKPDVCNYNTLIGGYLFIGKMDEVSKLLDNMCSIGLNPNVFTYGILIDGYSKNGSIGDALVVFREMLEGKVKPSIISFNIMIGALLKCGRKEEAKDLFDGIWANVLVPDVVTYRLMIHKLIEEGSLQESDDLFVSMEKDGCAADSRMLNAIVRRLLQKGEMPRAGTYLSKIDERRFTLEASTASLLTALVSGGKGQEYKELLPKKYQSFLEQGTD

SEQ ID NO: 464 - protein, 714 aa, Triticum aestivum
MSRRLVPVGRRILERKIEERYCAGDIGTDDALNLFYELIQVARPSSIRAINCLLTVVRRDCPALGVSLFNRVARAKVPPHNITYGILVDCCCRAGRLDLGHAAMGHVIKLGFAAQAVVNFSHLLKAICAEKKTSYAMDIVLRVIPMFNCVPDVFSYSILFKGLCNERRSQEALELIHIMVQHGGSCQPNVVSYSTVIDGLLKEGEMNKAYSLFCEMLQRGISPNVVTCSSIISGMCKLHAMDKAEEVLQQMLDRGILPNSTTYNGLIHGYYSLEQCEEVGRIFKEMSRNGVQPNIVTYNIQMDYLCKSGRCAEARKIFDSMVSLGQKPDVTTYGILLHGYAMERSFHDIHCLIDLMVGNGLSPNNYIYSILISACAKEKMVDEAMHIFTKMRQQGFNPDVVSYGMVIDLLSSIGRMDDAMSQFNQMITEGLAPDIIVFNPLISGFCSCGKWEKVHELFSEMLDRSICPDRVFFNTVMDHLCKSERVMEAQDVLDLMIHMGVKPVVRDYNRLIHGYFLVGKMDEGRKLLDNMCSIGLKPNVVTYNILIDGYSKNGRIDDALVVFRETLDNVKVSVITFTIMIGALLKCGRKEEAKDMFDGIWANGLVPDVVTYSLMIQKLIEEGSLQESDDLFISMEKNGCAADSRLLNAIVRSLLQKGEILRAGTYLSKIDERSFTLEASTASLLTALASGGKGQEYKELLPEKYHSFLEQGTD

SEQ ID NO: 465 - protein, 714 aa, Triticum aestivum; identical to SEQ ID NO: 464

SEQ ID NO: 466 - protein, 724 aa, Triticum aestivum
MGLGRQNPMGFVPVAIWSRTSPCSALSCLQRWPRPCRHPLQPHVPRRWCTRVVSPTCCTYSILMDCCCRADRPDLVVAFFGHLLRLGLRLNVISFNNLLKGLCQAKRSNEAVDLLLHRTPELDSVPNVFSYGIVINGCFKQGEVDKACNLFHEMIQLGVQPNVVIYTSIIDALSKCGAMDKAEVVLQQMVDQGIEPNIRTYTSLVHGYSASGQWKAAVRVFKEMVSVGILPNAFTLNSFMDSLCKHRRTKEARVIFDSMAAKGQKPNIVSYSTMLNGYAKEGCFDDMTCFLNLMLQNGVVPDHHVFNILINACAKRGLMDEAMHMFEVMRQQGVNPDVFGYQIIMDSLCKKGKMDAALEKFNQMVNEGVSPNKAVYQCLVLGSCSHDHFLKAKELISEAVNRGLCSNSAFFYPVINDLCKEGKVKEAQDMFDFIVGIGQRPDVIMYNSLMDGYCLVGKVEEALRVLDAMKSAGLQPTAVTYDILLNGYCKIGRIAAGLSLFMEMSLSGVKPTTIMYNIILDGLFRSGRTDSAKEKFRTMSESGIPVGIGTYNIVLSGLCKNNCTGEAIELFKKLRAMNVKIDVKTLTIMISAMFKSRRIEEAKELFATISAIGLVPSVVTYSVMMTNFIKEGSLAEADDMFLAMEKASCAPNSMLLNQVVRALLKKGAVVKAATYLAKLDAKQLSVEASMISLIVFLFSGEGKLREHVELLPVKYQPPESSADN

SEQ ID NO: 467 - protein, 715 aa, Triticum aestivum
MSRRVVPVGRRILEQNIKARYHAGDIGTEDALHLFDELLQDAGRSSIHAINCLLTVVGRDCPALGVSLFNRVARSKVAPSSITYAILVDCCCRAGRQDLGHTAMGHVIKMGFLADAIITFSHLLKAICAENKTSYAMDIVLRIMPEFNCMPNIFSYNILFKGLCNEKRSQEALELIQIMVEDGGCCRPDVVTYSTVIDGLLKEGEVGKAYSLFCEMLRQGVSPDIVTCSSIISGMCKLHAMDKADEVLQQMLDRRILPDVATYNSLVHGYYSLGQCEEVDRVLKEMSRNGVQPNIVTYNIQMDYLCKSGRCAEARKIFDFMIGLGQKPDVTTYSVLLHGYAMEKSFHEMHCLIDLMVGNGISPDHHVYNILISAYAKEEMVGEVLHIFTKMRQQGLNPNVVNYGAVINLLSSIGRMDDAMSQFSQMITEGLAPDVIVFNSLISGFCSCGKWEKVHELFSEMFDRGICPDTVFFNTVMDHLCKNGRVMEAQDVFDLMVHMGVKPFVRDYNTLIHGYCLVGKMDEGRKLLDNMFSIGSKPDDFTYSILIDGYSKKGRIDDALIVIKEMLDGKVKPSIITFNIMIGALLKGGRKEEAKDLFDGIWAKGLVPDVVTYSLMIQKLIEEGSLQESDDLFLSMEKNGCAADSRMLNAIVRSLLQKGEVPRAGTYLSKIDERRFTPEASTASLLTALVSGGKGQEYKELLPEKYHSFLEQGTG

SEQ ID NO: 468 - protein, 715 aa, Triticum aestivum; identical to SEQ ID NO: 467

SEQ ID NO: 469 - protein, 715 aa, Triticum aestivum
MNRRVVPVGRRILEQNIKARYHAGDIGTEDALHLFDELLQDAGRSSIHAINCLLTVVGRDCPALGVSLFNRVARSKVAPSSITYAILVDCCCRAGRQDLGHTAMGHVIKMGFLADAIITFSHLLKAICAENKTSYAMDIVLRIMPEFNCMPNIFSYNILFKGLCNEKRSQEALELIQIMVEDGGCCRPDVVTYSTVIDGLLKEGEVGKAYSLFCEMLRQGVSPDVVTCSSIISGMCKLHAMDKAEEVLQQMLDRRILPDVATYNSLVHGYYSLGQCEEVDRVLKEMSRNGVQPNIVTYNIQMDYLCKSGRCAEARKIFDFMIGLGQKPDVTTYSVLLHGYAMEKSFHEMHCLIDLMVGNGISPDHHVYNILISAYAKEEMVGEVLHIFTKMRQQGLNPNVVNYGAVINLLSSIGRMDDAMSQFSQMITEGLAPDVIVFNSLISGFCSCGKWEKVHELFSEMFDRSICPDTVFFNTVMDHLCKNGRVMEAQDVFDLMVHMGVKPFVRDYNILIHGYCLVGKMDEGRKLLDNMFSIGSKPDDFTYSILIDGYSKKGRIDDALIVIKEMLDGKVKPSIITFNIMIGALLKGGRKEEAKDLFDGIWAKGLVPDVVTYSLMIQKLIEEGSLQESDDLFLSMEKNGCAADSRMLNAIVRILLQKGEVPRAGTYLSKIDERRFTPEASTASLLTALVSGGKGQEYKELLPEKYHSFLEQGTG

SEQ ID NO: 470 - protein, 715 aa, Triticum aestivum
MSRRFVPVSRRILEQNIKAPYHAGDIGTEDALHLFDELLQVAGRSSIHAINCLLTVVCHDCPALGVSLFNRVARSKVAPCSITYAILVDCCCRAGRLDLGHTAMGHIIKMGFTADAMITFSHLLKAICAENKTSYAMDIVLRIMPMFNCVPNNFSYNILFKGLCNERRSQEALELIHMMVQHGGSCQPNVVSYNTVVDGLLKEGEVGKAYTLFSEMLRQGISPDVVTCRSIISGMCKVHAMDKAEEVLQQMLDRRILPDVATYNSLIHGYYLLGQCEEVDRIFKEMSRNGVQPNVVTYTIQMDYLCKSGRCAEARKIFDSMISLGQKPDVYTYSILLHGYAMEKSFHDMHCLIDLMVENGIAPDHHVYNILISACAQEEMVSDVMHIFTKMRQQGLNPNVANYGVVVNLLCSMGRMDDAMYQYNQMITEGLDPDIIVFSTLISGFCSCGAWERVHEIFSEMLNRGIYPDTVFFNIIMDHLCKEGRVMEAQDIFDLMVHMGVKPFVRDYNTLIHGYCLVGKMDEGRKLLDNMCSIGLKPDDFTYSILIDGYSMKGRIDDALIVVRELLDGKVGPSIITFNIMIVALLKGGRKEEAKDLFDGIWAKGLVPDVVTYSLMIQKLIEEGSLQESDDLFLSMEKNGCAADSRMLNAIVRSLLQKGDVPRAGTYLSKVDERSFTLEGSTATLLTALASGRKGQEYKGLLPEKYHSFLEQDTG

SEQ ID NO: 471 - protein, 715 aa, Triticum aestivum; identical to SEQ ID NO: 470

SEQ ID NO: 472 - protein, 600 aa, Triticum aestivum
MAGPKSHLLKAICAENKTSYAMDIVLRIMPMFNCVPNNFSYNILFKGLCNERRSQEALELIHMMVQHGGSCQPNVVSYNTVVDGLLKEGEVGKAYTLFSEMLRQGISPDVVTCRSIISGMCKVHAMDKAEEVLQQMLDRRILPDVATYNSLIHGYYLLGQCEEVDRIFKEMSRNGVQPNVVTYTIRMDYLCKSGRCAEARKIFDSMISLGQKPDVYTYSILLHGYAMEKSFHDMHCLIDLMVENGIAPDHHVYNILISACAQEEMVSDVMHIFTKMRQQGLNPNVANYGVVVNLLCSMGRMDDAMYQYNQMITEGLDPDIIVFSTLISGFCSCGAWERVHEIFSEMLNRGIYPDTVFFNIIMDHLCKEGRVMEAQDIFDLMVHMGVKPFVRDYNTLIHGYCLVGKMDEGRKLLDNMCSIGLKPDDFTYSILIDGYSMKGRIDDALIVVRELLDGKVGPSIITFNIMIVALLKGGRKEEAKDLFDGIWAKGLVPDVVTYSLMIQKLIEEGSLQESDDLFLSMEKNGCAADSRMLNAIVRSLLQKGDVPRAGTYLSKVDERSFTLEGSTATLLTALASGRKGQEYKGLLPEKYHSFLEQDTG

SEQ ID NO: 473 - protein, 715 aa, Triticum aestivum; identical to SEQ ID NO: 470

SEQ ID NO: 474 - protein, 715 aa, Triticum aestivum; identical to SEQ ID NO: 470

SEQ ID NO: 475 - protein, 715 aa, Triticum aestivum; identical to SEQ ID NO: 470

SEQ ID NO: 476 - protein, 715 aa, Triticum aestivum; identical to SEQ ID NO: 470

SEQ ID NO: 477 - protein, 715 aa, Triticum aestivum
MSRRFVPVGRRILEQNIKARYHAGDIGTEDALHLFDELLQVAGRSSIHAINCLLTVVGRDCPALGVSLFNRVARAKVAPCSITYAILVDCCCRTGRQDLGFAAMGHVIKMGFTADAMITFSHLLKAICAENKTSYAMDIVLRIMPMFNCIPDVFSYNILFKGLCNEKRSQEALELIQVMVEHGGRCQPDVVSYSTVIDGLLKEGLVGKVYILFCEMIQRGISPNAVTYNSIISGMCKVHAMDKAEQVLQQMPDRGILPNVATYTSLIHGYFSLGQCKEVDRIFKEMSRNGVQPNVVTYNIQMDYLCKNGRCAEARKIFDSMVSLGQKPTVTTYSILLHGYALERSFHEIHCLIDLMVGNGIAPNHFLYNILISAYAKEEMIGEVMHIFKKMRQHGLNPNVATYGAVVNLLSKIGRMDDAMSQFNQMITEGLAPDIIVFTLLISGFCSCGKWEKVDELFSEMLDRGICPNTVFFNIIMDCLCKNERVMEAQDLFDLMVHMGVKPDVCTYNTLIGGYLFIGKMDEVRKLLDNMVSIGLKPNVITYSILIDGYSKNGSIDDALVVSREMLAGKVKPCVITFNIMIGALLKCGRKAEAKDLFDGIWANGLVPDVITYSLMIQKLIEEGSLQESDDLFLSMEKNGCVADSHMLNAIVRSLLQKGEVPRAGTYLSKIDERRFTFEASTASLLVALASGRKSQEYKELLPEKYHYFLEEGTD

SEQ ID NO: 478 - protein, 415 aa, Triticum aestivum
MSRRFPPGAMSRRILERKIQDRYHAGHIGTHNALNLFDELIQVAGPSSVRAINCLLTVVGRDCPVLGVSLFNRVARAKVPPHNITYSILVDCCCRAGCLDLGHAAMGHVIKLGFTEAIVNFSHLLKAICAEKKTSYAMDIVLRIMPMFNCVPNIFSYSIVFKGLCNEKRSQEALELIQIMVEDGGCCRPDVVTYSTVIDGLLKEGEVDQAYNLFSEMLRQGVSPNVVTCSSIISGMCKAQSVDKAKEVLQQMFERGILPNITTYNSLIQGYYSLGRCKEVDQIFKEMTINGVQPDIITYNIQMDYLCKSGQCAEARKIFDSMISLGQNPTATTYSILLHGYAMEKSFHDMHCLIDLMVENGISPDHYVYNILISAYAKEEMVGEVMHIFTKMRQQGLNPDAVSYGTVIDLLSRIG

SEQ ID NO: 479 - protein, 415 aa, Triticum aestivum; identical to SEQ ID NO: 478

SEQ ID NO: 480 - protein, 717 aa, Triticum aestivum
MSRRFPPGAMSRRILERKIQDRYHAGHIGTHDALNLFDELIQVAGPSSVRAINCLLTVVGRDCPALGVSLFNRVARAKVPPHNITYSILVDCCCRAGRLDLGHAAMGHVIKLGFTEEAIVNFSHLLKAICAEKKTSYAMDIVLRIMPMFNCVPNIFSYSIVFKGLCNEKRSQEALELIQIMVEDGGCCRPDVVTYSTVIDGLLKEGEVDQAYNLFSEMLRQGVSPNVVTCSSIISGMCKAQSVDKAKEVLQQMFERGILPNITTYNSLIQGYYSLGRCKEVDQIFKEMTINGVQPDIITYNIQMDYLCKSGQCAEARKIFDSMISLGQNPTATTYSILLHGYAMEKSFHDMHCLIDLMVENGISPDHYVYNILISAYAKEEMVGEVMHIFTKMRQQGLNPDAVSYGTVIDLLSRIGRMDDAMSLFNQMITEGLAPGTIVFNHLISGFCTCGKWEKVHELFSEMLDRGICPDTVFFNTVMDRLCKNGRVTEAQDLFDLMVHMGVKPDVCTYNTLMGGYLFIGKMDEVSKLLENMCSIGLKLDVVTYSILIDGYSKNGRIDDALVVFREMMDGKVKPSVITFNIMIGALLKGGRKEEATDLFNGIWPKGLVPDVVTYSLMIQKLIEEGSLQESDDLFLSMEKNGCAADSRMLNAIVRSLLQKGEVPRAGSYLSKIDERSFTLEASTASLVTALASGGKGQEYKELLPEKYHSFLEHGTD

SEQ ID NO: 481 - protein, 415 aa, Triticum aestivum; identical to SEQ ID NO: 478

SEQ ID NO: 482 - protein, 614 aa, Triticum aestivum
MGHVIKLGFTEEAIVNFSHLLKAICAEKKTSYAMDIVLRIMPMFNCVPNIFSYSIVFKGLCNEKRSQEALELIQIMVEDGGCCRPDVVTYSTVIDGLLKEGEVDQAYNLFSEMLRQGVSPNVVTCSSIISGMCKAQSVDKAKEVLQQMFERGILPNITTYNSLIQGYYSLGRCKEVDQIFKEMTINGVQPDIITYNIQMDYLCKSGQCAEARKIFDSMISLGQNPTATTYSILLHGYAMEKSFHDMHCLIDLMVENGISPDHYVYNILISAYAKEEMVGEVMHIFTKMRQQGLNPDAVSYGTVIDLLSRIGRMDDAMSLFNQMITEGLAPGTIVFNHLISGFCTCGKWEKVHELFSEMLDRGICPDTVFFNTVMDRLCKNGRVTEAQDLFDLMVHMGVKPDVCTYNTLMGGYLFVGKMDEVSKLLDNMVSIGMEPDVITYSILIDGYSKNGRIDDALVVFREMLDTKGKPSVISFNIMIGALLKCGRKEEAKDLFDGIWANGLVPDVITYSLMIQKLIEEGSLQESDDLFLSTEKNGCAADSRRLNAIVRSLLQKGEIPRAGTYLSKIDERGFTLEASTASLLTALASGGKGQEYKELLPEKYHSFLEQGTLNF

SEQ ID NO: 483 - protein, 715 aa, Triticum aestivum
MSRRFVPVDRRILERNIKDRYHAGCIGTEDALHLFDELLQVAGPSSIPAINCLLTVVGRDCPALGVSLFNHVARAKVPPHNITYGILVDCCCRAGRLDLGHAAMGHVIKLGFTAEAIINFSHLLKAICAEKKTSYAMDIVLRIMPEFNCIPNIFSYNILFKGLCNEKRSQEALELIQIMVEDGGCCRPDVVTYSTVIDGLLKEDEVDQAYSLFSEMLRQGVSPNVVTCNSIISGMCKLHAMDKAEEVLQQMLDRRILPDVTTYTSLIHGYYSLGQCEEVDRVFIEMSRNGVQPNIITYSIQMDYLCKNGRCTEARKNFDFMISLGQKPTVTTYNIMLHGYAMERSFHDMNCLIDLMDDNGISPDHYGYNILIFAYAEEKMVDEVMHIFTKMRQQGLNPDAVSYGTVIDLLSRIDRMDDAMSQFNQMITEGLVPDIVVFNPLIRGFCSCGKWEKVDELFSEMLDRGICPNIVFFTTIMDRLCKNGRVMEAQDLFDLMVHMGVKPDVCTYNILIGGYLFIGKMDEVSKLLDNMVSIGMEPDVITYNILIDGYSKNGRIDDAFVVFREMLAGKVKPCIITFNIMLGALLKGGRKEEAKDLFDGIWAKGLVPTVVTYSLMIQKLIEEGSLQESDDLFVSMEKNGCAADSHIINAIVRSLFRKGEVPRAGTYLSKIDERSFTLEASTAILLTALASGGKGQEYKELLPEKYHSFLEQGTD

SEQ ID NO: 484 - protein, 715 aa, Triticum aestivum; identical to SEQ ID NO: 483

SEQ ID NO: 485 - protein, 715 aa, Triticum aestivum; identical to SEQ ID NO: 483

SEQ ID NO: 486 - protein, 715 aa, Triticum aestivum; identical to SEQ ID NO: 483

SEQ ID NO: 487 - protein, 715 aa, Triticum aestivum; identical to SEQ ID NO: 483

SEQ ID NO: 488 - protein, 715 aa, Triticum aestivum
MSRRFVPVDRRILERNIKDRYHAGCIGTEDALHLFDELLQVAGPSSIPVINCLLTVVGHDCPALGVSLFNHVARAKVPPHNITYGILVDCCCRAGRLDLGHAAMGHVIKLGFTAEAIINFSHLLKAICAEKKTSYAMDIVLRIMPEFNCIPNIFSYNILFKGLCNEKRSQEALELIQIMVEDGGCCRPDVVTYSTVIDGLLKEDEVDQAYSLFSEMLRQGVSPNVVTCNSIISGMCKLHAMDKAEEVLQQMLDRRILPDVTTYTSLIHGYYSLGQCEEVDRVFIEMSRNGVQPNIITYSIQMDYLCKNGRCTEARKIFDFMISLGQKPTVTTYNIMLHGYAMERSFHDMNCLIDLMDDNGISPDHYGYNILIFAYAEEKMVDEVMHIFTKMRQQGLNPDAVSYGTVIDLLSRIDRMDDAMSQFNQMITEGLVPDIVVFNPLIRGFCSCGKWEKVDELFSEMLDRGICPNIVFFTTIMDRLCKNGRVMEAQDLFDLMVHMGVKPDVCTYNILIGGYLFIGKMDEVSKLLDNMVSIGMEPDVITYNILIDGYSKNGRIDDAFVVFREMLAGKVKPCIITFNIMLGALLKGGRKEEAKDLFDGIWAKGLVPTVVTYSLMIQKLIEEGSLQESDDLFVSMEKNGCAADSHIINAIVRSLFRKGEVPRAGTYLSKIDERSFTLEASTAILLTALASGGKGQEYKELLPEKYHSFLEQGTD

SEQ ID NO: 489 - protein, 715 aa, Triticum aestivum; identical to SEQ ID NO: 483

SEQ ID NO: 490 - protein, 713 aa, Triticum aestivum
MSRRFPTVGRRILERKIQDRYRAGHIGTDDALNLFDELIQLAGPSSVRAINCLLTVVGRDCPALGIFLFNRVARAKVPPHNITYGILVDCCCRAGRLDLGHAAMGHVIKLGFAAEAIVNFSHLLKAICAEKKTSYAMEIVLRIMPMFNCVPNIFSYSILFKGLCNEKRSQEALELIHIMVDHGGSCQPNVVSYNTVVDGLLKEGEAGKAYSLFSEMLQREILPDVVTYNSIISGMCKVHAMDKAEEVLRQMFDRGILPDIATYTSLIHGYYSSGQCKEVERVFNEMSRNGVQPNMVTYNIQMDYLCKSGRCTEARKIFDSLIDLGQKLTVTTYSILLHGYALERSLHGMHCLIDLMVGNGISPDHHVYNILISVYAKEGMVGEVMHIFTKMRQQGLNPDVVNYGTVINLLCSIGRMDDAMLQFSQMITEGLAPNIIVFTPLISGFCTYGKWEKVHELFSEMFDRGIYPDTLFFTTVMDRLCKNERVMEAQDIFDLMGHMGVKPDVCTYNTLIGGYLFVGKMDEVRKLLDNMVSIGMEPDVITYSRLIDGYSKNGRIDDALVVFWEMLDGKVKPSVITFNIIIGALLQGGRKEEAKDLFDCIWAKGLVPDVVTYSLMIQKLIEEGSLQESDDLFISMEKNGCAADSRMLNAIVRSLLQKEEILRAGTYLSKIDERRFTLEASTASLLTALVSGGKGQEYKELLPENYSELLIEA

SEQ ID NO: 491 - protein, 691 aa, Triticum aestivum
MSRRAVPAGRRILEQNIKARYRAGNIGTEDALHLFDELLPVARPSSVPAINCLLIVVGRDCPALAVSLFNRIARTKVAPQNITYGILVDCCCLAGRLDLGFAAMGHIIKTGFAAGSVISFSHLLRAVCAEKKTSYGMDIVLRIMPELNCTPDVYSYSILFKGLCNEKRSQEALELIHVMVEHGGSCQPNLVSYSTVIDGLLKEGEVGKAYSLFCEMVHRGISPDIVTYNSIISGMCKVHAMDKAEKVLQQMFDREILPDTTTYTSLIHGYYSSGQCKEVERVFEHMSINGVQPNMITYNIQMDYLCKSGRCAEARKIFDSMVSLGQKPSVTTYSILLHGYAMEKSFHDMHCLIDLMVENGISPDHYVYNMLISACPKEEMFGEVMHIFTKMRQQGLNPNVANYGAVINLLSSAGKMDDAMCQFNQMITEGLAPDIVIFNTLISGFCTCGKWEKVHELFSEMLNRGIYPDIVSFTILMDRLCKSGRVIEAQDMFDLMVRIGVKPNIHTYGTLMHGYFFVRKVDEVRKLLGNMLSTGLKPDVFTYTILIDGYFKNGMIDDASAVFTEMLEKKVEPSVITYRTMRYGLLNSGRTVAATKLYLRMIDSGIHVDIAAYNIILRGLCKNNCVDGALRMFQHLSSTNYPLEVGTYNIMISALVKGGRKEEATDLFDDMLAKGLVPDAVMYSLIKKGVV

SEQ ID NO: 492 - protein, 691 aa, Triticum aestivum; identical to SEQ ID NO: 491

SEQ ID NO: 493 - protein, 691 aa, Triticum aestivum; identical to SEQ ID NO: 491

SEQ ID NO: 494 - protein, 691 aa, Triticum aestivum; identical to SEQ ID NO: 491

SEQ ID NO: 495 - protein, 691 aa, Triticum aestivum; identical to SEQ ID NO: 491

SEQ ID NO: 496 - protein, 691 aa, Triticum aestivum; identical to SEQ ID NO: 491

SEQ ID NO: 497 - protein, 663 aa, Triticum aestivum
MDCCCRANRQDLALAFFGRLLRTGLKAGVIEVNTLLKGLCRAKRADEALDILLHRMPELGCAPNVVAYTTVIHGFFKEGQVSKACNLFHEMALQGVTPDVVTYNSVIDALCKARAMDNAEYFLRQMVDNGVVPNNVTYSSLIHGYSSSGHWKEAVRVFKEMTGRRVTPDVHTYNMFMTFLCKHGRSKEAAGIFDTMAMKGLKPDNVSYAIRLHGYATEGCLVDMINLFNSMERDCILPDCHIFNILINAYAKSGKLDKAMLIFNEMQKQGVSPNAVTYSTIIHAFCKKGRLDDAVIKFNQMIDTGVRQGTAVYRSLIQGFCTHGDLVKAKELLTEMMNKGIPPPDIKFFHSIMQNLCTEGRVIEARDILGLIAHIGMRPNVCTFNILIGGYCLVGKMEDASKIFDDMMSYGLEPSNITYGILINGYCKNRRIDDGLILFKEMLRKGLKPTTFNYNVILDGLFLAGQTVAAKEKFDEMVESGVSVCIDTYSIVLGGLCRNSCSSEAITLFRKLSAMNVKFNITIVNTIIGAFYRVERNQEAKDLLAAIPASGLVPNVVTYTIMIKNLIKEGSVEEADNLFLSIEKSGCSANSYLLNHIIRRLLEKGETVKAGNYMSKVDAKSYSLEAKTVSLLISLFSRKGKYREHIKLLPTKYQFLEEAATVE

SEQ ID NO: 498 - protein, 267 aa, Triticum aestivum
MEDASKIFDDMMSYGLEPSNITYGILINGYCKNERINDGLILFKEMLRKGLKPTTFNYNIILDGLFLAGQTVAAKEKFDEMVESGVSVCIDTYSIVLGGLCRNSCSSEAITLFRKLSAMNVKFNITIVNTIIGAFYRVERNQEAKDLFAAIPASGLVPNVVTYTIMIKNLIKEGSVEEADNLFLSMEKSGCSANFYLLNHIIRRLLEKGEIVKAGNYMSKVDAKSYSLEAKTVSLLISLFSRKGKYREHIKLLPTKYQFLEEAATVE

SEQ ID NO: 499 - protein, 663 aa, Triticum aestivum
MDCCCRANRQDLALAFFGRLLRTGLKAGVIEVNTLLKGLCRAKRADEALDILLHRMPELGCAPNVVAYTTVIHGFFKEGQVSKACNLFHEMALQGVTPDVVTYNSVIDALCKARAMDKAEYFLRQMVDNGVVPNNVTYSSLIHGYSSSGHWKEAVRVFKEMTGRRVTPDVHTYNMFMTFLCKHGRSKEAAGIFDTMAMKGLKPDNVSYAIRLHGYATEGCLVDMINLFNSMERDCILPDCHIFDILINAYAKSGKLDKAMLIFNEMQKQGVSPNAVTYSTIIHAFCKKGRLDDAVIKFNQMIDTGVRQGTAVYRSLIQGFCTHGDLVKAKELLTEMMNKGIPPPDIKFFHSIMQNLCTEGRVIEARDILGLIAHIGMRPNVCTFNILIGGYCLVGKMEDASKIFDDMMSYGLEPSNITYGILINGYCKNRRIDDGLILFKEMLRKGLKPTTFNYNVILDGLFLAGQTVAAKEKFDEMVESGVSVCIDTYSIVLGGLCRNSCSSEAITLFRKLSAMNVKFNITIVNTIIGAFYRVERNQEAKDLFAAIPASGLVPNVVTYTIMIKNLIKEGSVEEADNLFLSIEKSGCSANSYLLNHIIRRLLEKGETVKAGNYMSKVDAKSYSLEAKTVSLLISLFSRKGKYREHIKLLPTKYQFLEEAATVE

SEQ ID NO: 500 - protein, 259 aa, Triticum aestivum
MNCCCRVCRPDLGFALFGRLLRRGLKTDDIVTNTLLKCLCCAKRTDEAVSVLLHRMSKLGCVPDVISYNTVLKSLCDNSSSQRALDLLQMMTKGGGCSPDVVTYNTVIHGFLQEGEVSKACDRYHEMVQQGVLHDVVTYNSILDALCKAGAMDKAELFLQQMADDDIRPNEVTYNAMIHGYSTLGQWKRATQMFREMTSRGLAPNIVTWSSLMTSLCKHGRSKEAAEIFIPWLQKATSLTSLRIVFCFTGMPLRDSLQI

SEQ ID NO: 501 - protein, 607 aa, Triticum aestivum
MMTKGGGCSPDVVTYNTVIHGFLQEGEVSKACDLYHEMVQQGVLHDVVTYNSILDALCKAGAMDKAELFLRQMVDDDIRPNEVTYNAMIHGYSTLGQWKKATQMFREMTSRGLAPNIVTWSSLMTSLCKHGRSKEAAEIFHSMAAKGHKPNIVTYRVLLHGYAAEGFFADMIDLFNSMANNGIVPDCHVFNILINAYAKCGMMDEAMSMLTEMRGQGVSPDVFTYATVIAALCRMGRLTDAMDNFNRMIGKGVQPSKVVYHSLIQGFCTHGNLVKVKELIFGMTDKGIPHPNIVFFSSIMHSLCNEGRVMDAHHIFDLVIDIGERPDLITFNTLIDGYCLVSKMEEALRLLDSMVSAGIKPNVITYNTLINGYCRSGRLDDGVILFREMLHTRVKPNTVTYNIILDGLFRAGRTVAAKKMFHEMIETGTAVSISTYSIVLGGLCRNNCTDEAITFFQKLVAMNVKSDIAILNTMIKAMYKVQRREEANDLFASLPAYGLVPNAATYRVMISNLLKEGSLEEADNMFSSMEKSGCAPSSRLVNDIIRKLLEKGEIVKAGNYMSKVDGKIISFEASTTSLLLSLFSEKGKYREQLQLLPAKYQLFEGVI

SEQ ID NO: 502 - protein, 465 aa, Triticum aestivum
MAAKGHKPNIVTYRVLLHGYAAEGFFADMIDLFNSIANNGIVPDCHVFNILINAYAKCGMMDEAMSMLTEMRGQGVSPDVFTYATVIAALCRMGRLTDVMDNFNRMIGKGVQPSKVVYHSLIQGFCTLGDLVKVKKLIFEITDKGIPHPNIVFFSSIMHSLCNEGRVMDAHHIFDLVIDIGERPDLITFNMLIDGYCLVSKMEEALRLLDSMVSAGIKPNVITYNTLINGYCRSGRLDDGVILFREMLHTRVKPNTVTYNIILDGLFRAGRTVAAKKMFHEMIETGTAVSISTYSIVLGGLCRNNCTDEAIAFFQKLVAMNVKFDIVILNTMIKAIYKVQRREEANDLFALLPACGLVPNASTYGVVIQNLLKEGSLEEADNMFSSMEKSGCAPSSRLVNDIIRKLLEKGEIVKAGNYMSKVDGKIISFEVSTTSLLLSLFSEKGKYREQLQLLPAKYQFFEGVI

SEQ ID NO: 503 - protein, 607 aa, Triticum aestivum; identical to SEQ ID NO: 501

SEQ ID NO: 504 - protein, 607 aa, Triticum aestivum
MMTKGGGCSPDVVTYNTVIHGFLQEGEVSKACDLYHEMVQQGVLHDVVTYNSILDALCKAGAMDKAELFLRQMVDDDIRPNEVTYNAMIHGYSTLGQWKKATQMFREMTSRGLAPNIVTWSSLMTSLCKHGRSKEAAEIFHSMAAKGHKPNIVTYRVLLHGYAAEGFFADMIDLFNSMANNGIVPDCHVFNILINAYAKCGMMDEAMSMLTEMRGQGVSPDVFTYATVIAALCRMGRLTDAMDNFNRMIGKGVQPSKVVYHSLIQGFCTHGNLVKVKELIFEMTDKGIPHPNIVFFSSIMHSLCNEGRVMDAHHIFDLVIDIGERPDLITFNTLIDGYCLVSKMEEALRLLDSMVSAGIKPNVITYNTLINGYCRSGRLDDGVILFREMLHTRVKPNTVTYNIILDGLFRAGRTVAAKKMFHEMIETGTAVSISTYSIVLGGLCRNNCTDEAITFFQKLVAMNVKSDIAILNTMIKAMYKVQRREEANDLFASLPAYGLVPNAATYGVMISNLLKEGSLEEADNMFSSMEKSGCAPSSRLVNDIIRKLLEKGEIVKAGNYMSKVDGKIISFEASTTSLLLSLFSEKGKYREQLQLLPAKYQFFEGVI

SEQ ID NO: 505 - protein, 696 aa, Triticum aestivum
MNCCCRVCRPDLGFALFGRLLRTGLKTDDIVTNTLLKCLCCAKRTDEAVSVLLHRMSKLGCVPDAISYNTVLKSLCDNSSSQRALDLLQMMTKGGGCSPDVVTYNTVIHGFLQEGEVSKACDRYHEMVQQGVLHDVVTYNSILDALCKAGAMDKAELFLRQMVDDDIRPNEVTYNAMIHGYSTLGQWKRATQMFREMTSRGLAPNIVTWSSLMTSLCKHGRSKEAAEIFHSMAAKGHKPNIVTYRVLLHGYAAEGFFADMIDLFNSIANNGIVPDCHVFNILINAYAKCGMMDEAMSMLTEMRGQGVSPDVFTYATVIAALCRMGRLTDVMDNFNRMIGKGVQPSKVVYHSLIQGFCTLGDLVKVKKLIFEITDKGIPHPNIVFFSSIMHSLCNEGRVMDAHHIFDLVIDIGERPDLITFNMLIDGYCLVSKMEEALRLLDSMVSAGIKPNVITYNTLINGYCRSGRLDDGVILFREMLHTRVKPNTVTYNIILDGLFRAGRTVAAKKMFHEMIETGTAVSISTYSIVLGGLCRNNCTDEAIAFFQKLVAMNVKFDIVILNTMIKAMYKVQRREEANDLFASLPACGLVPNASTYGVVIQNLLKEGSLEEADNMFSSMEKSGCAPSSRLVNDITRKLLEKGEIVKAGNYMSKVDGKIISFEASTTSLLLSLFSEKGKYREQLQLLPAKYQFFEGVI

SEQ ID NO: 506 - protein, 607 aa, Triticum aestivum; identical to SEQ ID NO: 504

SEQ ID NO: 507 - protein, 607 aa, Triticum aestivum; identical to SEQ ID NO: 501

SEQ ID NO: 508 - protein, 307 aa, Triticum aestivum
MSKLGCVPDAISYNTVLKSLCDNSSSQRALDLLQMMMKGGGCSPDVVTYNTVIHGFLQEGEVSKACDRYHEMVQQGVLHDVVTYNSILDALCKAGAMDKAELFLRQMVDDDIRPNEVTYNAMIHGYSTLGQWKKATQMFREMTSRGLAPNIVTWSSLMTSLCKHGRSKEAAEIFHSMAAKGHKPNIVTYRLLLHGYAAEGFFADMIDIFNSMANNGIVPDCHVFNILINAYAKCGMMDEAMSMLTEMRGQGVSPDVFTYATVIAALCRMGRLTDAMDNFNRMIGKGVQPSKVVYHSLIQGSVCMVIW

SEQ ID NO: 509 - protein, 696 aa, Triticum aestivum; identical to SEQ ID NO: 505

SEQ ID NO: 510 - protein, 465 aa, Triticum aestivum; identical to SEQ ID NO: 502

SEQ ID NO: 511 - protein, 259 aa, Triticum aestivum; identical to SEQ ID NO: 500

SEQ ID NO: 512 - protein, 696 aa, Triticum aestivum; identical to SEQ ID NO: 505

SEQ ID NO: 513 - protein, 607 aa, Triticum aestivum; identical to SEQ ID NO: 501

SEQ ID NO: 514 - protein, 696 aa, Triticum aestivum; identical to SEQ ID NO: 505

SEQ ID NO: 515 - protein, 569 aa, Triticum aestivum
MINLGVQPDAVTYSSFINALSKSGAMDKAEVVLRQMVDQGIVPNIITYTSLIHEYSTSGQWKAAVRIFKEMTSTGVRPNSVTLNSFIDSLCKHRKTKEARDIFDSMAANGHKPDIFSYSTLLNGYVKEGCFDDMTDLFNSMVRNGIVPNHHVFNILINAYAKRGLMDKAMHMFEVMRQQGVNPDVFSYQIVMDSLCKMGRMDAALDKFNQMVNQGVSPNKAVYQCLVLGSCSHGHFVKAKELISEAINRGLYSNSVFFYRVINDLCKEGKVNEAQDMFDFILGIGQRPDVIMYTSLMDGYCLVGEVEKALSVLDAMKSAGLQPDDVVYGTLLNGYCKIGRIADGLSLFREMSLSVVKPTTIIYNIILDGLFCSGRTVCAKENFDMMIESGIPVGVDTYNIVLHGLCRNNCTDEAIELFKKLCAMNVKINVITLNTMISALFKTRRIEEAKDLFATISAIGLVPSVVTYSVMMTNFIKEGLLADADDMFSAMEKAGCAPNSRLLNQVVRVFLKNGEVVKAVTYLAKLDAKQLSLEASTVSLIVSLFSRKGKLRKHVKLLPVKYQPPEMLD

SEQ ID NO: 516 - protein, 628 aa, Triticum aestivum
MDCCCRAHRLDLAFAFFGRLLRTGLKAGVIEVNTLLKGLCHTKRADEAMEVLLHRMPELGCTPDVVAYTTVIHGFFKEGQVGKACSLFHGMAQQGVAPDVMTYSSVIDALCKAKAMDKAEYFLRQMVDNGVVPDNVTYNSLIHGYSSSGHWKEAVRVLKEMTSQGIIPDIVSYRILLHGYATEGCLVDMINLFNSMARYCILPDCHIFNILINAYAKSGKLDKAMLIFREMQKQGVSPDAVTYSTVIHAFCKNGRLDDAVIKFNQMIDTGVQPNTSVYNALIQGFSTNGDLVKAKELVTEMMNKGMHPPDIKVFHSVMQNLCTEGRVTEARDILDLIVHIGMRPDVFTFTLLIGGYCLVGKMEDASKIFDDMMSYGLEPCNITYGILINGYCKNRRIDDGLILFKEMLHKGLKPTTFNYNVILDGLFLAGRTVAAKEKFDEMVESGVSVCIDTYSIVLGGLCRNNCSGEAITLFQKLSKMNVKFNIRIVNFMIDAFFRVQRKQEAEDLFAAISANGLVANVFTYSLMMTNLIKEGSAEKADTLFLSMEKSGCTANSWMLNLIIRRLLEKGEIVKAGNYMAKVDAKSYSLEAKTVSLLISLFSGKGKYREHIRLLPTKYQFREEAATVE

SEQ ID NO: 517 - protein, 668 aa, Triticum aestivum
MDCCCCRAHRLDLALAFFGHLLKTGLEADQVVFNTLLKGLCHAKRADEALDVLLHRMTELGCTPNVVAYNTIIHGFFKEGQVSKACNLFHEMAQQGVKPNVVTYNSVIDALCKARAMDKAEVVLRQMVDNGVVPDNVTYNSLIHGYSSSGHWKEAVRVFKEMTSRRVTADAHTYNMFMTFLCKHGRSKQAAGIFDSMAMKGLKPDNISYAILLHGYATEGCLVDVINLFNSIERDCILPDSRIFSILINAYAKSGKLDKAMLIFREMQKQGVSPDAFTYSTLIHAFCKKGRLDDAMIKFNQMVDTGVRQGTAVYGSLIQGFCTHGDLVKGKELVTEMMNKGIPPPDIMFFHSIMQNLCTERRVVEARDILGLIAHIGMRPNVCTFNILIGGYCLVRKMEDASKIFHDMMSYGLEPSNVTYGILINGYCKNRRIDDGLILFKEMLRKGLKPTTFNYNIILDGLFLAGRTVAAKEKFDEMVESGVSMCISTYSIVLRGLCRNNCSGEAITLFQKLSAMHVKFNIRIVNIMIDAFFRVQRKQEAKDLFAALTANGLVANVFTYSLMMTNLIKEGSVEEADTLFLSMEMSGCTSNSWMLNLIIRGLLEKGEIVKAGCYMSKVDAKSYSLEAKTVSLLIYLFSGKGKYREHIRLLPTKYQFLEEAATVEWFAI

SEQ ID NO: 518 - protein, 668 aa, Triticum aestivum; identical to SEQ ID NO: 517

SEQ ID NO: 519 - protein, 668 aa, Triticum aestivum; identical to SEQ ID NO: 517

SEQ ID NO: 520 - protein, 560 aa, Triticum aestivum
MDCCCRAHRVDLTLAFFGGLLRTGLEADQVIFSTLLKGLCHAKRTDEALNVLLHRMTELGCTPNVVAYSTVIHGFFKEGQVGKACSLFHEMAQQGVAPNLVTYTSVIDALCKAKAMDKAEYFLRQMVDNGVVPNNVTYNSLIHGYSSSSHWKEAVRVFKEMTSRRVTADVHTYNMFMTFLCKHGRSKEAAGFFDSMAMKGLKPDNVSYAILLHGYATEGCLVDMINLFNSMEKDSILPNCHIFSILINAYAKSGKLDKAMLIFSEMQKQGVSPDAVTYLPVIDAFCKKGRLDDAVIKFNQMIDMGVRPDTAVYTSLIQVFCTHGDLLKAKELVTEMMNKGIPPPDIKFFHSIMQNLCTEGRVIEARDILGLIAHIGMRPNVCTFNILIGGYCLVRKMEDASKIFDDMMSYGLEPSNITYGILINGYCKNLRIDDGLILFKEMLRKGVKPTTFNYNVILDGLFLAGRTVVAKEKFHEMVESGVSVCIGTYSIVLGGLCRNSCSSEAVTLFQKRKGAIAPGSLDSLLSGPYSLVKIRARLCIAAAHLQRQDLTATNNSARRL

SEQ ID NO: 521 - protein, 550 aa, Triticum aestivum
  REGION 530..532: note = misc_feature - Xaa can be any naturally occurring amino acid
  SITE 534: note = misc_feature - Xaa can be any naturally occurring amino acid
  SITE 537: note = misc_feature - Xaa can be any naturally occurring amino acid
  REGION 543..544: note = misc_feature - Xaa can be any naturally occurring amino acid
  SITE 550: note = misc_feature - Xaa can be any naturally occurring amino acid
MHSNEALDLLLHRMPELDCAPDVFSFNIVINGCFREGEVDKACNLFHEMPQLGVQPDVVTYNSIIIALSRAGAMGKAEVVLRQMVDKGIGPDVMTYNSLIHGYSTLGQWKAAVRVFKEMVSVGVLPNAVTLNSFMDSLCKHRRTKEARDIFDSMAAKGHKPNIASYSTMLNGYAKQGCFDDMTGLFNSMVQNDIVPNNHVFNILIRAYSTRGLMDEAMHMFEVMKQQGVNPDVVDYLVVIDSLCKMGRMDAAMDKFNQMVNQGVSPDIVVYQCLVLGSCSNGDFVKAKELISEAVNRGLCSNSVFFYPVINNLSKEGNVKDAQDMFDFIVGIGHQPDVIMYNSLMDGYCLVGKVEEAMTVLDAMKSAGLQPDAITYAILLNGYCKIGRIDDGLSLFREISLSRVKPTTIMYNIILDGLFCCGRTVFAKEEFDTMIESGIPVGIDTCTIVLSGLCKNNCTDEAIELFKKLCAMNVKFDVIILTTMISAMFKTRRIEEAKDLFATISTIGLVPSVVTYSVMMTNFIKEGSLXXXDXMFXAMEKAXXLEDLTX

SEQ ID NO: 522 - protein, 619 aa, Triticum aestivum
MHSNEALDMLLHRMPELDCAPDVFSFNIVINGCFREGEVDKACNLFHEMPQLGVQPDVVTYNSIIIALSRAGAMGKAEVVLRQMVDKGIGPDVMTYNSLIHGYSTLGQWKAAVRVFKEMVSVGVLPNAVTLNSFMDSLCKHRRTKEARDIFDSMAAKGHKPNIASYSTMLNGYAKQGCFDDMTGLFNSMVQNGIVPNNHVFNILIRAYSTRGLMDEAMHMFEVMKQQGVNPDVVDYLVVIDSLCKMGRMDAAMDKFNQMVNQGVSPDIVVYQCLVLGSCSNGDFVKANELISEAVNRGLCSNSVFFYPVINNLSKEGNVKDAQDMFDFIVGIGHQPDVIMYNSLMDGYCLVGKVEEAMTVLDAMKSAGLQPDAITYAILLNGYCKIGRIDDGLSLFREISLSRVKPTTIMYNIILDGLFCCGRTVFAKEEFDTMIESGIPVGIDTCTIVLSGLCKNNCTDEAIELFKKLCAMNVKFDVIILTTMISAMFKTRRIEEAKDLFATISTIGLVPSVVTYSVMMTNFIKEGSLAEADDMFLAMEKAGCAPDSRLLNHVVRVLLEKGAVVKAATYLAKLDGKQLSLEASTVSLIVSLFSRKGKLREHVKLLPVKYQPPESSTDN

SEQ ID NO: 523 - protein, 522 aa, Triticum aestivum
MHSNEALDLLLHRMPELDCAPDVFSFNIVINGCFREGEVDKACNLFHEMPQLGVQPDVVTYNSIIIALSRAGAMGKAEVVLRQMVDKGIGPDVMTYNSLIHGYSTLGQWKAAVRVFKEMVSVGVLPNAVTLNSFMDSLCKHRRTKEARDIFDSMAAKGHKPNIASYSTMLNGYAKQGCFDDMTGLFNSMVQNDIVPNNHVFNILIRAYSTRGLMDEAMHMFEVMKQQGVNPDVVDYLVVIDSLCKMGRMDAAMDKFNQMVNQGVSPDIVVYQCLVLGSCSNGDFVKAKELISEAVNRGLCSNSVFFYPVINNLSKEGNVKDAQDMFDFIVGIGHQPDVIMYNSLMDGYCLVGKVEEAMTVLDAMKSAGLQPDAITYAILLNGYCKIGRIDDGLSLFREISLSRVKPTTIMYNIILDGLFCCGRTVFAKEEFDTMIESGIPVGIDTCTIVLSGLCKNNCTDEAIELFKKLCAMNVKFDVIILTTMISAMFKTRRIEEAKDLFATISTIGLVPSVVTYSVIFFF

SEQ ID NO: 524 - protein, 632 aa, Triticum aestivum
MAFQSTAAAVLAAWTLDTAAMGHVIKLGFAEESIVNFSHLLKAICAEKKTSCAMDIVLRVMPELNCTPNIFSYSILFKGLCNEKRSQEALDLIHIMVEHGGSCQPNVVSYSTVIDGLLKEGEVNKAYSLFCEMLQRRISPDVVTCSSIISGMCKLHAMDKAEDVLQQMLDRGILPDVATYTSLMHGYYSLGQCEEVDRIFKEMSRNGVQPDIVTSNIQMDYLCKNGRCAEARKIFDSMVSLGQKPTVTTYSILLHGYAMERSFHDMNCLIDLMVGNGIAPNHFIYNILISAYAKEEMVDDVLHIFTKMRQQGLNPNVVNYGAVINLLSSFGRMDDAMSQFNQMIAEGLAPDIIVFNPLIRGFCSCGKWKKVHELFSEMLDRGIYPNTVFFNTIMDRLCKYGRVMEAQDLFDLMVHMGVKPDVCTYNTLIGGYLFVGKMDEVSKLLDNMVSIGMEPDVITYNILIDGYSKNGRIDDALVVSREMLAGKVKPCVITFNIMIGALLKCGRKEEAKDLFDGIWAKGLVPTVVTYSLMIQKLIEEGSLQESDDLFVSMEKNGCAADSHMLNAIVRSLFRKGEVPRAGTYLSKIDERSFTLEASTASLLTALASGGKGQEYKELLPEKYHSFLEQGTD

SEQ ID NO: 525 - protein, 632 aa, Triticum aestivum; identical to SEQ ID NO: 524

SEQ ID NO: 526 - protein, 632 aa, Triticum aestivum; identical to SEQ ID NO: 524

SEQ ID NO: 527 - protein, 646 aa, Triticum aestivum
MSELGCVHNAFSYSIVLKSLCDNSMSQRGLDMLQMMAKEGGVCFPNVVAYSTVIHGFFKEGETGKACNLFHEMMQQGLVPDVVTYNSIIDALCKARAMDKAELVLRQMVANGAQPDTVTYNCMINGYATSGRLKESAKMFREMKSRGLMPDIVTCNSFLSSLCKHGRSKEAAEFFDSMTAKGHKPDIVSCRILLHGYATEGCFADMIDLFNSVGSNGIAADCRVFKILINRYAKRGMTDEAMLIFTEMRGQGVSPNVVTYSIVIAALSRKLSRMGRLTDAMDKFDQMVALGVQPDRSIYQSLIQGFFMHGGLVKAKELVSQMINKGIPRPDIVFFNSVINSMCKEGRVMDAHDIFDLVIDIGERPDDISFNSLIDGYCLVGNMDKAFKILDAMEVGVEPDVITYNTLVNGYCRNGRIDDGLALFREMPHKRIKPDTVTYDIILNGLFHSGSTVAARKMFHEMIESGITVSIPTYGIIIAGFCRNNCAEEAIDLFHKLSAMNVKFDIAIHNTMINAIFKVGRREEAKDLFAAISPSGLVPTESTYAVMITNLLEDGVVEEADNMFSSMEKSGIIPSSRLLNCIIRMLLEKGEIAKAGNYLSKVDGKSILLEASTTLLMLSLFSKKGKYREDMKLLPAKYQFFMDLVD

SEQ ID NO: 528 - protein, 646 aa, Triticum aestivum
MSELGCVHNAFSYSIVLKSLCDNSMSQRGLDMLQMMAKEGGVCFPNVVAYSTVIHGFFKEGETGKACNLFHEMMQQGLVPDVVTYNSIIDALCKARAMDKAELVLRQMVANGAQSDTVTYNCMINGYATSGRLKESAKMFREMKSRGLMPDIVTCNSFLSSLCKHGRSKEAAEFFDSMTAKGHKPDIVSCRILLHGYATEGCFADMIDLFNSVGSNGIAADCRVFKILINRYAKRGMTDEAMLIFTEMRGQGVSPNVVTYSIVIAALSRKLSRMGRLTDAMDKFDQMVALGVQPDRSIYQSLIQGFFMHGGLVKAKELVSQMINKGIPRPDIVFFNSVINSMCKEGRVMDAHDIFDLVIDIGERPDDISFNSLIDGYCLVGNMDKAFKILDAMEVGVEPDVITYNTLVNGYCRNGRIDDGLALFREMPHKRIKPDTVTYDIILNGLFHSGSTVAARKMFHEMIESGITVSIPTYGIIIAGFCRNNCAEEAIDLFHKLSAMNVKFDIAIHNTMINAIFKVGRREEAKDLFAAISPSGLVPTESTYAVMITNLLEDGVVEEADNMFSSMEKSGIIPSSRLLNCIIRMLLEKGEIAKAGNYLSKVDGKSILLEASTTLLMLSLFSKKGKYREDMKLLPAKYQFFMDLVD

SEQ ID NO: 529 - protein, 646 aa, Triticum aestivum; identical to SEQ ID NO: 527

SEQ ID NO: 530 - protein, 638 aa, Triticum aestivum
MSRRFVPLDRRILERNIKARYHAGDIGTQDALHLFDELLHVAGPSSVRAINCLLTVVGRDCPALGVSLFNRVARAKVPPHNVTYGILVDCCCRAGRLDLGHAAMGRVIKLGFTAEAIVNFSHLLKAICAEKKTSYAMDIVLRIMPEFNCIPNIFSYNILFKGLCNEKRSQEALDLIQVMVEDGGCCQPDVVTYNTVIDGLLKEGEVGKAYSLFSEMLRQGVSPNVVTCNSIISGMCKLHAMDKAEEVLQQMLDRGILPDVATYNSLIHGYYSLGQCEEVDRIFKEMTTNGVQPDIVTYNIQMDYLCKNGRCAEARKIFDSMISLGQKPTVTTYNILLHGYAMERSFHDMNCLIELMDDNGISPDHYGYNILISAYAKEKMVDDVLHIFTKMRQQGLNPDVANYGAVINLLSSIGRMDDAMSQYNQMINEGLAPDIIVFNSLISGFCSCGKWEKVHELFSEMLDRGICPNTVFFTTIMDRLCKNGRVMEAQDLFDLMVHMGVKPDVWTYNTLIGGYLFIGKMDEVSKLLDNMCSIGLKPNVFTYGILIDGYSKNGSIDDALVVIREMLDGVKPSIITFNIMIGVLLKGSRMEEAKDLFDGIWAKGLVPDVVTYSLMIQKLIEEGSLTVVNFFHQASKLL

SEQ ID NO: 531 - protein, 638 aa, Triticum aestivum; identical to SEQ ID NO: 530

SEQ ID NO: 532 - protein, 638 aa, Triticum aestivum; identical to SEQ ID NO: 530

SEQ ID NO: 533 - protein, 615 aa, Triticum aestivum
MRILKYETVITSTKYLNTKQIQNIQQNCMMHACTNTTQSHALRVKCMVRSGPANRIPVAPSPHLRPPSSRRWTRPVGRRRRALGLTVAAGRSERHHRTRPSSFHQSKVLVVASRIHRCRNWTATMSRLQVRSFSSPVSSRANDLLSELQGHLGFRTLRPELAHQLFDQMMRQPVPVSARALNGLFAALARAPPSAACTDGPALAIDLFNRMARAGRRRVIALTSHTYSILIECCCRVRRPDLGPSFFAHLLKTGVTANIVIYSGLIKCLCDLKCTEEALDVLLHRMPNNISDAISYSVILKSFCDSGRSQLALDLLHMMAKKGADHSPDVLAYNMVIDGFFKEGEVSKTFDLFHEMIQQGPVPDVVTYSFFINALCKARAMDKAEVVLRSMIHNGVQPDAVTYNSLIQGFLTSGQLKEAFRLLKLMTRQGVIPDVVTCNSVMDYLCKHGRVKEAAEIFYSTAVKGRKPDIVSYSIMLHGYAIEGSLVKMIDLCEMMARDGVVPDLSCFNILIKAYAKYGRMDVAMLFFEDMLKQGVKPNELTYLTVISAFCKMGRMDDAMEKFSEMINMGVPLDTEVYMCMVEGYLNLGDSMKAKEFITKMKNRDIHHKPWKGNR

SEQ ID NO: 534 - protein, 602 aa, Triticum aestivum
MPRFSSTTSMSSLRLRLRLHARHSSSASQPSRSQGWDPHAAFAAATERARSGNLTPEDAHNLFDELLRQGNPVLERPLNNLLAALARAPASSACGDGPALAVALFSRISQGARLRVAHPTACTYSILMDCCYRARCPDLSLAFFGRLLRTGLKADQFVFSTLLKGLCHAKRSDEALDVLLHRMPELGCTPYVVAYNTVIHGFFREGQVGKACNLFHEMRQQGVTPDVVTYNSVIDALCKAKAMDKAEYFLGQMVDDGVVPDNVTYNSLIHGYSSSGHWKEAVRVFKEMTSRRVTADVHTYNMFMTFLCKHGRSKEAAGIFDTMAMKGLKPNIVSYSTLLHGYATEGCLIDMINLFNSMERDCILPNCHIFSILINAYAKSGKLDKAMLIFNEMQKQGLSPDAFTYLPVIDAFCKKGRLDDAMIKFNQMIDTGVRPDTAVYTSLIQGFCTHGDLVKAKELVTEMMNKGIPPPDIKFFHSIMQNLCTEGRVTKAWDILGLIAHIGMRPNVVTFSVLVGGYCLVRKMADASKVFDDMVSYGLEPCNIMYGILINGYCKNRRIDDGLILFKEMLHKGLKPTTFNYNVILNGLFLAGQTVAAKEKFD

SEQ ID NO: 535 - protein, 602 aa, Triticum aestivum; identical to SEQ ID NO: 534

SEQ ID NO: 536 - protein, 602 aa, Triticum aestivum; identical to SEQ ID NO: 534

SEQ ID NO: 537 - protein, 602 aa, Triticum aestivum; identical to SEQ ID NO: 534

SEQ ID NO: 538 - protein, 602 aa, Triticum aestivum; identical to SEQ ID NO: 534

SEQ ID NO: 539 - protein, 602 aa, Triticum aestivum; identical to SEQ ID NO: 534

SEQ ID NO: 540 - protein, 618 aa, Triticum aestivum
MSQRALDLLQMMAKEGGGCSPNVVAYSTVIRGFFKEGETGKACNLFHEMMQQGVEPSVWTYSSIIDALCKARAMDKAELVLQQMVNKGVQPNNVTYNCMIHGYSTSGQSKEAAKLLREMKSRDLIPDIVTRNSFLASLCKHGRSKEAAEFLDSMTAKGHKPDIVSYRILLHGYASEGCFADMIDLFNSMESNGIAADCHVFNILINGYAKRGMTEEAMLIFTEMRGQGVSPDVVTYSIVIAALSRMGRLTDAIEKFNEMTALEVQPDTTVYHSLIQGCCIDGDLVKAKELMFEMMNGGIPRPNIVFFNSVINSLCKEGRVMDAHDVLDLVIGIGERPDVITFNSLIDGYCLVGKTDKAFKILDVMKSVGVESDVVTYSALLDGYFKNRRIDDALTLFREMPRKRIKPGTVTYGIMLDGLFRAGRTVAAKKMFHEMNESGTTVDISTYNIILGGLCRNKCADEAITLFQKLRAMNVKLNIKILNTMINAMYTVQRKEEAKDLFSAMSANGLVPNESTYAVMIRNLLKDGAVEDADNMFSSMDNSGIIPSSCLINDIIRMLLEKGEIAKAGNYLSKVDGKRISLEASTTSLMLSLFSRKGKHQEDIKLLPAKYQFFDGFG

SEQ ID NO: 541 - protein, 618 aa, Triticum aestivum; identical to SEQ ID NO: 540

SEQ ID NO: 542 - protein, 618 aa, Triticum aestivum; identical to SEQ ID NO: 540

SEQ ID NO: 543 - protein, 618 aa, Triticum aestivum; identical to SEQ ID NO: 540

SEQ ID NO: 544 - protein, 618 aa, Triticum aestivum; identical to SEQ ID NO: 540

SEQ ID NO: 545 - protein, 618 aa, Triticum aestivum; identical to SEQ ID NO: 540

SEQ ID NO: 546 - protein, 320 aa, Triticum aestivum
MDYLCKNGRCAEARKIFDSMVSLGQKPTVTTYSILLHGYAMERSFHDMNCLIDLMVGNGIAPNHFIYNILISAYAKEEMVGEVMHIFTKMRQQGLNPDVANYEAVINLLSSIGRMDDAMSQYNQMITEGLLPGIILFSQLISGFRTCGKWEKVHELFSEMLDRGIYPNTVFLNTIMDHLCKNGRVMEAQDLFDLMVHMGVKPDVCTYSTLIGGYLFVGQMDEVSKLLDNMVSIGLKPNVITYTILIDGYCKNGRIDDALVVFREMLAGKVKPCIITFNIMIGALLKGGRKEEAKDLFDGIWAKGLVPTVVTYSLMIQKLI

SEQ ID NO: 547 - protein, 621 aa, Triticum aestivum
MSRRVVPVGRRILEQNIKARYHARDIGTEDALHLFDELLQDAQPSSIHAINCLLTIIRRDCPALGVSLFNRIARAKVAPDIITYGILVQCCCRAGRLDLGHAAMGHIIKLGFAAESIVNFNHLLKAICAEKKTSYAMDIVLRLMPEFNCIPNIFSYNILFKGLCNEKRSQEALELIQIMVEDGGCCRPDVVTYNTVVDGLLKEGEVGKAYSLFSEMLHRGISPNAVTYSSIICGMCRLHLMDKAEEVLQQMFDREILPDVATYTSLIHGYYSLGQCEEVDRIFKEMSRNGVQPDIVTYNIQMDYLCKNGRCAEARKIFDSMVSLGQKPTVTTYSILLHGYAMERSFHDMNCLIDLMVGNGIAPNHFIYNILISAYAKEEMVGEVMHIFTKMRQQGLNPDVANYEAVINLLSSIGRMDDAMSQYNQMITEGLLPGIILFSQLISGFRTCGKWEKVHELFSEMLDRGIYPNTVFFNTIMDHLCKNGRVMEAQDLFDLMVHMGVKPDVCTYSTLIGGYLFVGQMDEVSKLLDNMVSIGLKPNVITYTILIDGYCKNGRIDDALVVFREMLAGKVKPCIITFNIMIGALLKGGRKEEAKDLFDGIWAKGLVPTVVTYSLMIQKLI

SEQ ID NO: 548 - protein, 621 aa, Triticum aestivum; identical to SEQ ID NO: 547

SEQ ID NO: 549 - protein, 622 aa, Triticum aestivum
MRLWTFCFTGCLSLAAPLTWWRDVVAYNTVIHGFFKEGQVGKACNLFHGMAQQGVAPNLVTYNSVIDALCKAKAMDKAEYFLGQMVDDGVVPDNVTYNSLIHGYSSSGHWKEAVRVFKEMTSRRVKPNVHTHNMFMTFLCKHGRSKEAAGIFDTMAMKGLKHNNVSYAILLHGYATEGCLVDMINLFNSMERDCILPDCRIFSILINAYAKSGKLDKAMLIFNKMQKQGVSPNAVTYSTVIDAFCKKGQLDDAMIKFNQMIDTGVRQGTAVYGSLIQGFCTHCDLVKAKELLTEMMNKGMLPPDIAFFNSIMQNLCTEGRVIEARDVLGLIAHIGVRPDVCTFNILIGGYCLVGKMEHASKIFDDMMSYGLEPSNITYGILINGYCKNRRIDDGLILFKEMLHKGLKPTTFNYNVILDGLFLAGRTVAAKEKFDEMVESGVSVCIGTYSIVLGGLCRNNCFSEAIMLFQKLRAMNMKFNIRIVNIMIDAFFRVQRKQEAKDLFAAIPANGLVANVVTYSITMTNLIKEGSVEEANTLFLSMEKSGCTANAWMLNHTIRRLLERGEIVKAGNYMSKVDAKSYSLEAKTVSLLISLFSGKGKYREHIGLLPTKYQFREEAATVE

SEQ ID NO: 550 - protein, 622 aa, Triticum aestivum; identical to SEQ ID NO: 549

SEQ ID NO: 551 - protein, 622 aa, Triticum aestivum
MRLWTFCFTGCLSLAAPLTWWRDVVAYNTVIHGFFKEGQVGKACNLFHGMAQQGVAPNLVTYNSVIDALCKAKAMDKAEYFLGQMVDDGVVPDNVTYNSLIHGYSSSGHWKEAVRVFKEMTSRRVKPNVHTHNMFMTFLCKHGRSKEAAGIFDTMAMKGLKHNNVSYAILLHGYATEGCLVDMINLFNSMERDCILPDCRIFSILINAYAKSGKLDKAMLIFNKMQKQGVSPNAVTYSTVIDAFCKKGQLDDAMIKFNQMIDTGVRQGTAVYGSLIQGFCTHCDLVKAKELLTEMMNKGMLPPDIAFFNSIMQNLCTEGRVIEARDVLGLIAHIGVRPDVCTFNILIGGYCLVGKMEHASKIFDDMMSYGLEPSNITYGILINGYCKNRRIDDGLILFKEMLHKGLKPTTFNYNVILDGLFLAGRTVAAKEKFDEMVESGVSVCIGTYSIVLGGLCRNNCFSEAIMLFQKLRAMNMKFNIRIVNIMIDAFFRVQRKQEAKDLFAAIPANGLVANVVTYSITMTNLIKEGSVEEADTLFLSMEKSGCTANAWMLNHTIRRLLERGEIVKAGNYMSKVDAKSYSLEAKTVSLLISLFSGKGKYREHIGLLPTKYQFREEAATVE

SEQ ID NO: 552 - protein, 622 aa, Triticum aestivum; identical to SEQ ID NO: 551

SEQ ID NO: 553 - protein, 622 aa, Triticum aestivum
MRLWTFCFTGCLSLAAPLTWWRDVVAYNTVIHGFFKEGQVGKVCNLFHGMAQQGVAPNLVTYNSVIDALCKAKAMDKAEYFLGQMVDDGVVPDNVTYNSLIHGYSSSGHWKEAVRVFKEMTSRRVTADVHTHNMFMAFLCKHGRSKEAAGIFDTMAIKGLKPDNVSYAILLHGCATEGCLVDMINLFNSMATDCILPNCHIFNILINAYAKSGKLDKAMLIFNVMQKQGVSPDGVTYSTVIHAFCKMGSLDIAMDKFNQMVDMGVRPNAIVYHSLIQGFCTHGDLVKAKELVAEMRNKAMRPPDIKFFHSIMQNLCTEGRVIEARDILDLIVRIGMRPDVPIFNLLIGGYCLVRKMADASKIFDDMVSYGLEPSNITYGILINGYCKNRRIDDGLILFKEMLPKGLKPTTFNYNVILDGLFLAGRTVAAKEKFDEMVESGVSVCIGTYSIVLGGLCRNNCSGEAITLFQKLSTMDVKFNIIIVNIMIDAFYKVQRNQEAKDLFAAVSANGLVANVFTYTIMMKNLIKEGSVEEADDLFLSMEKSGCTADSYMLNLIVRMLLGKGEIVKAGNYISKIDAKSYSLEAKTVSLLISLFSGKGKYREHIGLLPAKYRFREEAATVV

SEQ ID NO: 554 - protein, 622 aa, Triticum aestivum; identical to SEQ ID NO: 553

SEQ ID NO: 555 - protein, 625 aa, Triticum aestivum
MICLHKRSKAIQSSPVQYAHSARPASPRRCPSLHLLRRRSSSFTPTSPPSRSWSPHAAFAAATESVRAGTLSPQDAHQLFDQLLRQSTPVPGQALNGFLAGLARARDTDACRDGPSLALTLFNRVYGEEAGPRVAPPTVHTYNILMNCCCRVGRSDLGLAYFSRLLRTGLKANEVTASTVLKCLCCAKPADEAVNVLLHRMSVLGCVPNSFSYNIVLKSLCDDSRSEQALDLLQVMAKGDDCPPPNVLSYSTLIHGFFKEGEVGKACNLFHEMMRQGVVPDVVTYSSIIDALCKAGAMDKAELFLRQMVDSGVPPNKVTYTSMIHGYSTLDWWKEATKMFREMTSRGLIPDIVSWNSFMDSLCKHGRSKEAAEIFDSMAAKGHRPNIVSYTILLHGYANEGSFADMMSLFNSMEGDGIVANCYVFNILINAYAKRRMMDEAVLILTEMRGQGLSPDVFTYSTLISALCKMGRLADAMDKFSQMIGTGVQPDTVVYQSLIQGFCTHGELVYEMMNKGIPCPNIAFFSSIVDSLCKEGRVMDAHHIFDLVKDIGERPDIIMFNTLIDGYCLVGEMGKAFMVLDVMTSAGIEPDAITYSTLVSGYCKSGRIDGGLILFREMLHKKCYI

SEQ ID NO: 556 - protein, 625 aa, Triticum aestivum; identical to SEQ ID NO: 555

SEQ ID NO: 557 - protein, 571 aa, Triticum aestivum
MPQLGVQPDVVTYTSIMDALSKSGAMDKAEVLLRQMVDQGIEPNIRTYSCLIHGYSTFGQWKEALRVFKEMASLGVVPDVVTLSSLIDSLCRHRRTKQAREIFDSMAAKGLKPNIVSYSTMLNGYVKEGSFEDMTDLFNSMVRNGIVPNHHIFNILINAYAKRGLMDEAMHMFEVMRQQGVNPDVFGYQIIMDSLCKMGKMDAALDKFNQMVNQGVSPNKAVYQCLVLGSCSHGDFVKAKELISEAVNRGLCSNSVFFYPVINDLCKEGKVKEAHDMFDFILGIGQRPDVIMYTSLMDGYCLVGKVEEALRVLDAMKSAGLQPDVFTYGTLLNGYCKIGRIADGLSLFREMSLSGVKPTTIMYNIILDGLFRSGRTDSAKEEFDTMIESGIPVGIDTCTIVLSGLCKNNCTDEAIELFKKLCAMNVKFDVIILNTMISSMFKTRRIEEAKDLFATISTIGLVPSVVTYSVMMTNFIKEGSLAEADDMFLAMEKASCAPNSILLNQVVRALLKKGAVVKAATYLAKLDAKQLSVEASTISLIVFLFSGEGKLREHVELLPVKYQPPESSADS

SEQ ID NO: 558 - protein, 571 aa, Triticum aestivum; identical to SEQ ID NO: 557

SEQ ID NO: 559 - protein, 607 aa, Triticum aestivum
MAKDRGGCFPDVVAYNTVIHGFFKEGETGKACNLFHEMIHQGVEPDVVTYNSVVDALCKARAMDKAELVLRQMVADGAQPNAVTYNCMINGYATSGRLKEAAKMFREMKSRGLIPDIFTCNSLMTYLCKHGRSKEAAEFFYSMTAKGHKPDIVSYCILLHGYATEGCFPDMIDVFNSMENNGIAADFHVFNILIDAYAKRGMMDEAMLISSKMQERRVNPDIVTYSSIIAGLSRLGRLTEAMEKFNQMIALGVQPNKVVYHALIQGFCIDGDLAKAKQLVSEMMNRGIPRPNISFFSSLIKSLCQEGRVMDAHDIFDLVIDMGERPDDILFNSLIDGYCLVRKMDKALKVLDVMESVGVEPDVITYNTLVNGYCRNGRIGDGLTLFREMPRKRIKPDTNSYCVIMDGLFRSGRTVSGREMFHEMIESGTTVSISTYNVILGGLCGNNCADEAIALFQKLGSMNVKFSIAIVNTMIDAMYRVGRREEAKELFAGISASGLVPNESTYGVMIMNLLKDGAVEDANNVFSSMDKSGIVPSSRLLNDIIRMLLEKDEIAKAGNYLSKVDGKSISLEASTTSLMLSLFSREGKYREDMKLLPAKYQFFDGFC

SEQ ID NO: 560 - protein, 607 aa, Triticum aestivum
MAKDRGGCFPDVVAYNTVIHGFFKEGETGKACNLFHEMIHQGVEPDVVTYNSVVDALCKARAMDKAELVLRQMVADGAQPNAVTYNCMINGYATSGRLKEAAKMFREMKSRGLIPDIFTCNSLMTYLCKHGRSKEAAEFFYSMTAKGHKPDIVSYCILLHGYATEGCFPDMIDVFNSMENNGIAADFHVFNILIDAYAKRGMMDEAMLISSKMQERRVNPDIVTYSSIIAGLSRLGRLTEAMEKFNQMIALGVQPNKVVYHALIQGFCIDGDLAKAKQLVSEMMNRGIPRPNISFFSSLIKSLCQEGRVMDAHDIFDLVIDMGERPDDILFNSLIDGYCLVRKMDKALKVLDVMESVGVEPDVITYNTLVNGYCRNGRIGDGLTLFREMPRKRIKPDTNSYCVIMDGLFRSGRTVSGREMFHEMIESGTTVSISTYNVILGGLCGNNCADEAIALFQKLGSMNVKFSIAIVNTMIDAMYRVGRREEAKELFAGISASGLVPNESTYGVMIMNLLKDGAVEDANNVFSSMDKSGIVPSSRLLNDIIRMLLEKGEIAKAGNYLSKVDGKSISLEASTTSLMLSLFSREGKYREDMKLLPAKYQFFDGFC

SEQ ID NO: 561 - protein, 607 aa, Triticum aestivum; identical to SEQ ID NO: 560

SEQ ID NO: 562 - protein, 607 aa, Triticum aestivum
MAKDRGGCFPDVVAYNTVIHGFFKEGETGKACNLFHEMIHQGVEPDVVTYNSVFDALCKARAMDKAELVLRQMVADGAQPNAVTYNCMINGYATSGRLKEAAKMFREMKSRGLIPDIFTCNSLMTYLCKHGRSKEAAEFFYSMTAKGHKPDIVSYCILLHGYATEGCFPDMIDVFNSMENNGIAADFHVFNILIDAYAKRGMMDEAMLISSKMQERRVNPDIVTYSSIIAGLSRLGRLTEAMEKFNQMIALGVQPNKVVYHALIQGFCIDGDLAKAKQLVSEMMNRGIPRPNISFFSSLIKSLCQEGRVMDAHDIFDLVIDMGERPDDILFNSLIDGYCLVRKMDKALKVLDVMESVGVEPDVITYNTLVNGYCRNGRIGDGLTLFREMPRKRIKPDTNSYCVIMDGLFRSGRTVSGREMFHEMIESGTTVSISTYNVILGGLCGNNCADEAIALFQKLGSMNVKFSIAIVNTMIDAMYRVGRREEAKELFAGISASGLVPNESTYGVMIMNLLKDGAVEDANNVFSSMDKSGIVPSSRLLNDIIRMLLEKDEIAKAGNYLSKVDGKSISLEASTTSLMLSLFSREGKYREDMKLLPAKYQFFDGFC

SEQ ID NO: 563 - protein, 607 aa, Triticum aestivum; identical to SEQ ID NO: 562

SEQ ID NO: 564 - protein, 607 aa, Triticum aestivum; identical to SEQ ID NO: 562

SEQ ID NO: 565 - protein, 567 aa, Triticum aestivum
MIHQGVEPDVVTYNSVVDALCKARAMDKAEVVLQQMVDKGVQPNIVTYTCMINGYSTTGRLKEAAKMFREMKSRGLIPDIVTCNSLMTSLCKHGRSKEAAEVFYSMTAKGHKPDIVSYRILLHGYATEGCFPDMIDVFNSMENNGIAADCHVFNILIDAYTKRGMIDEAMLISSKMQERRVNPDIVTYSSIIAGLSRLGRLTEAMEKFNQMIALGVQPNKVVYHALIQGFCIDGDLAKAKQLVSEMMNKGIPRPNISFFSSVIKSLCQEGRVMDAHDIFDLVIDMGERPDAILFNSLIDGYCLVRKMDKALKVLDVMESVGVEPDVITYNTLVNGYCRNGRIDDGLTLFREMPRKRIKPDTISYCVIMDGLFRSGRTVSAREMFHEMIENGTTVSISTYNVILGGLCRNNCADEAIALFQKLGSMNVKFSIAIVNTMIDAMYRVGRREEAKELFAGISARGLVPNVSTYGVLIMNLLKDGAVEDANNVFSSMDKSGIVPSSRLMNDIIRLLLEKGEIAKAGYYLSKVDGKSISLEASTTSLMFSLFSRKGKYMKDMNLLPAKYQFFD

SEQ ID NO: 566 - protein, 445 aa, Triticum aestivum
MIHQGVEPDVVTYNSVVDALCKARAMDKAEVVLQQMVDKGVQPNIVTYTCMINGYSTSGRLKEAAKMFREMKSRGLIPDIVTCNSLMTSLCKHGRSKEAAEVFYSMTAKGHKPDIVSYRILLHGYATEGCFPDMIDVFNSMENNGIAADCHVFNILIDAYTKRGMIDEAMLISSKMQERRVNPDIVTYSSIIAGLSRLGRLTEAMEKFNQMIALGVQPNKVVYHALIQGFCIDGDLAKAKQLVSEMMNKGIPRPNISFFSSVIKSLCQEGRVMDAHDIFDLVIDMGERPDAILFNSLIDGYCLVRKMDKALKVLDVMESVGVEPDVITYNTLVNGYCRNGRIDDGLTLFREMPRKRIKPDTISYCVIMDGLFRSGRTVSAREMFHEMIENGTTVSISTYNVILGGLCRNNCADEAIALFQKLGSMNVKFSIAIVNTMIDAMYRVG

SEQ ID NO: 567 - protein, 567 aa, Triticum aestivum
MIHQGVEPDVVTYNSVVDALCKARAMDKAEVVLQQMVDKGVQPNIVTYTCMINGYSTSGRLKEAAKMFREMKSRGLIPDIVTCNSLMTSLCKHGRSKEAAEVFYSMTAKGHKPDIVSYRILLHGYATEGCFPDMIDVFNSMENNGIAADCHVFNILIDAYTKRGMIDEAMLISSKMQERRVNPDIVTYSSIIAGLSRLGRLTEAMEKFNQMIALGVQPNKVVYHALIQGFCIDGDLAKAKQLVSEMMNKGIPRPNISFFSSVIKSLCQEGRVMDAHDIFDLVIDMGERPDAILFNSLIDGYCLVRKMDKALKVLDVMESVGVEPDVITYNTLVNGYCRNGRIDDGLTLFREMPRKRIKPDTISYCVIMDGLFRSGRTVSAREMFHEMIENGTTVSISTYNVILGGLCRNNCADEAIALFQKLGSMNVKFSIAIVNTMIDAMYRVGRREEAKELFAGISARGLVPNVSTYGVMIMNLLKDGAVEDANNVFSSMDKSGIVPSSRLMNDIIRLLLEKGEIAKAGYYLSKVDGKSISLEASTTSSMFSLFSRKGKYMKDMNLLPAKYQFFD

SEQ ID NO: 568 - protein, 567 aa, Triticum aestivum; identical to SEQ ID NO: 567

SEQ ID NO: 569 - protein, 567 aa, Triticum aestivum
MIHQGVEPDVVTYNSVVDALCKARAMDKAEVVLQQMVNKGVQPNIVTYTCMINGYSTSGRLKEAAKMFREMKSRGLIPDIVTCNSLMTSLCKHGRSKEAAEVFYSMTAKGHKPDIVSYRILLHGYATEGCFPDMIDVFNSMENNGIAADCHVFNILIDAYTKRGMIDEAMLISSKMQERRVNPDIVTYSSIIAGLSRLGRLTEAMEKFNQMIALGVQPNKVVYHALIQGFCIDGDLAKAKQLVSEMMNKGIPRPNISFFSSVIKSLCQEGRVMDAHDIFDLVIDMGERPDAILFNSLIDGYCLVRKMDKALKVLDVMESVGVEPDVITYNTLVNGYCRNGRIDDGLTLFREMPRKRIKPDTISYCVIMDGLFRSGRTVSAREMFHEMIENGTTVSISTYNVILGGLCRNNCADKAIALFQKLGSMNVKFSIAIVNTMIDAMYRVGRREEAKELFAGISARGLVPNVSTYGVMIMNLLKDGAVEDANNVFSSMDKSGIVPSSRLMNDIIRLLLEKGEIAKAGYYLSKVDGKSISLEASTTSSMFSLFSRKGKYMKDMNLLPAKYQFFD

SEQ ID NO: 570 - protein, 567 aa, Triticum aestivum; identical to SEQ ID NO: 567

SEQ ID NO: 571 - protein, 385 aa, Triticum aestivum
MMQQGVVPDVVTYNSIIDALCKARAMGKAELFLGQMVDNSVRPDNVTYTAVIHGYSTLGQWKKATKMFREMTRRGLEPNTVTWNSFMASLCKHGRSKEAAEIFHSMAAKGHKPDVVSYCVLLQGYATEGCFADMVDLYNSMARNGIVPNRQVFNILIDAYAKRGMTDEATLIFTEMRGQGLSPDVCTYSTLISALSRTGRLADAMDRFSQMISIGIQPDAVVYQALIQGYCTVGDLVKAKGLVSEMMNRGIPPTDIVFFNSIMSSLCKEGRVTNAHSILDFVIHFGERPSIITFNLLIDGYCLVGKMKKAFRVLDTMASVGIGPDDISYSAIINGCFKNGRIDDGLTIFREMLKKVTPTTVTYNIILGGLFCAGQTVAAQKMFMR

SEQ ID NO: 572 - protein, 385 aa, Triticum aestivum; identical to SEQ ID NO: 571

SEQ ID NO: 573 - protein, 569 aa, Triticum aestivum
MMQQGVVPDVVTYNSIIDALCKARAMGKAELFLGQMVDNSVRPDNVTYTAVIHGYSTLGQWKKATKMFREMTSRGLEPNTVTWNSFMDSLCKHGRSKEAAEIFHSMAAKGHKPDVVSYRVLLQGYATEGCFADMVDLYNSMARNGIVPNRQVFNILIDAYAKRGMTDEATLIFTEMRGQGLSPDVCTYSTLISALSRTGRLADAMDRFSQMISIGIQPDAVVYQALIQGYCTVGDLVKAKGLVSEMMNRGIPPTDIVFFNSIMSSLCKEGRVTNAHSILDFVIHFGERPSIITFNFLIDGYCLVGKMKKAFGVLDTMASVGIGLDDISYSAIINGCFKNGRIDDGLTIFREMLKKVTPTTVTYNIILGGLFCAGQTVAAQKMFHEMIESGITVSSSTYRTILGGLCRNSCEDEAITLFQKLGAMNVKLDIAILNTMINAMFKVQRREEAIDLFAAVSSSGLVPNASTYGVMIKNLLREGSVEKAENMFSLMEKSGCAPDSRLINDIIRILLQKGEIVKAGNYMSKVDGRRISLEARTTSLLIRLFSSEGKYRGQINLLPVKYQNFDGFS

SEQ ID NO: 574 - protein, 569 aa, Triticum aestivum; identical to SEQ ID NO: 573

SEQ ID NO: 575 - protein, 569 aa, Triticum aestivum; identical to SEQ ID NO: 573

SEQ ID NO: 576 - protein, 569 aa, Triticum aestivum
MMQQGVVPDVVTYNSIIDALCKVRAMGKAELFLGQMVDNSVRPDNVTYTAVIHGYSTLGQWKKATKMFREMTSRGLEPNTVTWNSFMDSLCKHGRSKEAAEIFHSMAAKGHKPDVVSYRVLLQGYATEGCFADMVDLYNSMARNGIVPNRQVFNILIDAYAKRGMTDEATLIFTEMRGQGLSPDVCTYSTLISALSRTGRLADAMDRFSQMISIGIQPDAVVYQALIQGYCTVGDLVKAKGLVSEMMNRGIPPTDIVFFNSIMSSLCKEGRVTNAHSILDFVIHFGERPSIITFNFLIDGYCLVGKMKKAFGVLDTMASVGIGLDDISYSAIINGCFKNGRIDDGLTIFREMLKKVTPTTVTYNIILGGLFCAGQTVAAQKMFHEMIESGITVSSSTYRTILGGLCRNSCEDEAITLFQKLGAMNVKLDIAILNTMINAMFKVQRREEAIDLFAAVSSSGLVPNASTYGVMIKNLLREGSVEKAENMFSLMEKSGCAPDSRLINDIIRILLQKGEIVKAGNYMSKVDGRRISLEARTTSLLIRLFSSEGKYRGQINLLPVKYQNFDGFS

SEQ ID NO: 577 - protein, 608 aa, Triticum aestivum
MMAKEGGGCFPNVVAYNTVIHGFLKEGKTGKACNLFHEMMQLGLVPDVVTYNSIVDALCKARAMDKAEVVLHQMIGKGAQPDTVTYNCMIHGYSTSGRLKEAVKMFREMKSRGLAPNIVTCGSLMTSLCKHGRSKEAREIFDSMTAKGHRANVVSYSILLHGYANEGCFADMIDLFNSMKSNGIAADCRVFTILIDAYAKRGMMDDAMHIFTEMWEKGVSPDVVTYSTVIAALSRMGRLTDAMDKFNQMISMGVQPNTVVYHTLIQGSCMHGDLIKAKELVSEMMNKGIPRPSIAFFGSIINRLCKDGRVMDAHDIFDLVIDIGERPSVITFNSLVDGYCLVGKMDKAFGMLNAMESVGVEPDIVTYSTLLDGYFKNGRINDGLTLFREMPLKRIKPDTVTYGIMLDGCFRAGRTVAARTMFHEMIESGITVDIPTYNIVLRGLCRNNCTDEAIALFQKLGAMSMKFNIAILNTMINAIYKVRRREEANNLFAAISASGLVPNQSTYAVMIINLLKDGAVEHASNMFSSMEKSGIVPSSRLINGIIRLLLENGEIAKAGIYLSKVDGNSISLEASTTSLMLSLFSRKGKYQEDMKLLPAKYQFFGEFG

SEQ ID NO: 578 - protein, 348 aa, Triticum aestivum
MMAKEGGGCFPNVVAYNTVIHGFLKEGKTGKACNLFHEMMQLGLVPDVVTYNSIVDALCKARAMDKAEVVLHQMIGKGAQPDTVTYNCMIHGYSTSGRLKEAVKMFREMKSRGLAPNIVTCGSLMTSLCKHGRSKEAREIFDSMTAKGHRANVVSYSILLHGYANEGCFADMIDLFNSMKSNGIAADCRVFTILIDAYAKRGMMDDAMHIFTEMWEKGVSPDVVTYSTVIAALSRMGRLTDAMDKFNQMISMGVQPNTVVYHTLIQGSCMHGDLIKAKELVSEMMNKGIPRPSIAFFGSIINRLCKDGRVMDAHDIFDLVIDIGERPSVITFKCNDTRPLCTYCLLLN

SEQ ID NO: 579 - protein, 608 aa, Triticum aestivum; identical to SEQ ID NO: 577

SEQ ID NO: 580 - protein, 608 aa, Triticum aestivum; identical to SEQ ID NO: 577

SEQ ID NO: 581 - protein, 265 aa, Triticum aestivum
MSWNQLVLSLMLLHIIHLLMAIVKVEGSMMVSFYSEKCRVRELNLTVTYGIILAGLFRAWRTIAARTMFHEMIESGITVDIVTYNIILTGLCRNNCIDEAIALFQKLGVMSVKFNIAIINTMIDAMYKVRRREEASDLFAAISASGLVPNESTYAVMIINLLKDGAVEEADNMFSSMEKSGIVPSSRLLNRIIRMLLEKGETAKAGNYLSKVDGKGISLEASTTSLMLSLFSREGKYREDVKLLPAKYQFFDGFVDFAQDSAQEA

SEQ ID NO: 582 - protein, 606 aa, Triticum aestivum
MWAYNTVIHGFFKEGETGKACNLFHEMVRQGIVPDVVTYNSIIDALCKARAMDKAELVLQQMVADGAQPNEVTYNSMINGYASSGRLKGTTKMFREMKRRGLIPDNFTCNSFLASLCKHGRSKEAAEFFDSMTAKGHKPDIVSYCTLLHGYASEGCFADMIDLFNSMESNVIAADCRVFTILIVAYAKRGMMDEAMLVSSKMQERGVNPNIFTYSSIIAGLSRMGRLTEAMEKFNQMIALGVQPDKVVYLSLIQGFCLDGDLAKVKQLVSEMMNRGIPHSGIPFFGSVIKNLCQEGRVMDAHEIFDLVIDMGERPDDILFNSLIDGYCLVGKMDKALKVLDVMESVGVEPDVITYNTLVNGYCKSGRIDDGLVLFREMPSKRVKPDTVTYGIILAGLFRAWRTIAARTMFHEMIESGITVDIVTYNIILTGLCRNNCIDEAIALFQKLGVMSVKFNIAIINTMIDAMYKVRRREEAGDLFAAISASGLVPNESTYAVMIINLLKDGAVEEADNMFSSMEKSGIVPSSRLLNRIIRMLLEKGETAKAGNYLSKVDGKGISLEASTTSLMLSLFSREGKYREDVKLLPAKYQFFYGFVDFAQDSAQEA

SEQ ID NO: 583 - protein, 410 aa, Triticum aestivum
MWAYNTVIHGFFKEGETGKACNLFHEMVRQGIVPDVVTYNSIIDALCKARAMDKAELVLQQMVADGAQPNEVTYNSMINGYASSGRLKGTTKMFREMKRRGLIPDNFTCNSFLASLCKHGRSKEAAEFFDSMTAKGHKPDIVSYCTLLHGYASEGCFADMIDLFNSMESNGIAADCRVFTILIVAYAKRGMMDEAMLVSSKMQERGVNPNIFTYSSIIAGLSRMGRLTEAMEKFNQMIALGVQPDKVVYLSLIQGFCLDGDLAKVKQLVSEMMNRGIPHSDIPFFGSVIKNLCQEGRVMDAHEIFDLVIDMGERPDDILFNSLIDGYCLVGKMDKALKVLDVMESVGVEPDVITYNTLVNGYCKSGRIDDGLVLFREMPSKRVKPDCYIWHHTGRVVSCLENYCCKDNVP

SEQ ID NO: 584 - protein, 606 aa, Triticum aestivum
MWAYNTVIHGFFKEGETGKACNLFHEMVRQGIVPDVVTYNSIIDALCKARAMDKAELVLQQMVADGAQPNEVTYNSMINGYASSGRLKGTTKMFREMKRRGLIPDNFTCNSFLASLCKHGRSKEAAEFFDSMTAKGHKPDIVSYCTLLHGYASEGCFADMIDLFNSMESNGIAADCRVFTILIVAYAKRGMMDEAMLVSSKMQERGVNPNIFTYSSIIAGLSRMGRLTEAMEKFNQMIALGVQPDKVVYLSLIQGFCLDGDLAKVKQLVSEMMNRGIPHSDIPFFGSVIKNLCQEGRVMDAHEIFDLVIDMGERPDDILFNSLIDGYCLVGKMDKALKVLDVMESVGVEPDVITYNTLVNGYCKSGRIDDGLVLFREMPSKRVKPDTVTYGIILAGLFRAWRTIAARTMFHEMIESGITVDIVTYNIILTGLCRNNCIDEAIALFQKLGVMSGKFNIAIINTMIDAMYKVRRREEASDLFAAISASGLVPNESTYAVMIINLLKDGAVEEADNMFSSMEKSGIVPSSRLLNRIIRMLLEKGETAKAGNYLSKVDGKGISLEASTTSLMLSLFSREGKYREDVKLLPAKYQFFDGFVDFAQDSAQEA

SEQ ID NO: 585 - protein, 606 aa, Triticum aestivum; identical to SEQ ID NO: 582

SEQ ID NO: 586 - protein, 606 aa, Triticum aestivum; identical to SEQ ID NO: 582

SEQ ID NO: 587 - protein, 606 aa, Triticum aestivum
MWAYNTVIHGFFKEGETGKACNLFHEMVRQGIVPDVVTYNSIIDALCKARAMDKAELVLQQMVADGAQPNEVTYNSMINGYASSGRLKGTTKMFREMKRRGLIPDNFTCNSFLASLCKHGRSKEAAEFFDSMTAKGHKPDIVSYCTLLHGYASEGCFADMIDLFNSMESNGIAADCRVFTILIVAYAKRGMMDEAMLVSSKMQERGVNPNIFTYSSIIAGLSRMGRLTEAMEKFNQMIALGVQPDKVVYLSLVQGFCLDGDLAKVKQLVSEMMNRGIPHSDIPFFGSVIKNLCQEGRVMDAHEIFDLVIDMGERPDDILFNSLIDGYCLVGKMDKALKVLDVMESVGVEPDVITYNTLVNGYCKSGRIDDGLVLFREMPSKRVKPDTVTYGIILAGLFRAWRTIAARTMFHEMIESGITVDIVTYNIILTGLCRNNCIDEAIALFQKLGVMSGKFNIAIINTMIDAMYKVRRREEASDLFAAISASGLVPNESTYAVMIINLLKDGAVEEADNMFSSMEKSGIVPRSRLLNRIIRMLLEKGETAKAGNYLSKVDGKGISLEASTTSLMLSLFSREGKYREDVKLLPAKYQFFDGFVDFAQDSAQEA

SEQ ID NO: 588 - protein, 535 aa, Triticum aestivum
MPRLRLRRFSTAPMFHLLRRSSSSTTTSPPSRSWSPHAAFAAATERIRAGTLSREDAHHLFDELLRQATPVPSRSLNGLLAALARVPAPAACIRDGPALALGLFNRVCRDEAGARVAPPTVFTYGILMHCCCCAHRPDLGLALFGRFLRTGLKTNEIIATTFLKCLCYAKRTDEALNVLLHRMSELGCVPDAISYNIVLKSLCEDSMSQRALDLLQMMAKEGGGCSPNVVAYSTVIHGFFKEGETGKACNLFHEMMQQDVEPNVWTYSSIIDALCNARAMDKAELVLQQMVNKGVQPNNVTYNCMIHGYSTSGRWKEAAKLFREMKSRGLIPDTSTCNALMTYHCKHGRSKEAAEFFDAMTAKGHRDVISYCILLHGYANEGCFADMIDLFNSMESNGFVADCHVFTILIDAYAKRGMMDEAMLIFTEMREKGVSPNVVTYSTVIAALCRLGRLSDAMDRFNEMTDMGVQPNTAVYHSLIQGFCMHGDLVKVKEFVSEMMNKGIPRPDIAFFTSVINSLCKEGRVMNAQVSLTWL

SEQ ID NO: 589 - protein, 535 aa, Triticum aestivum; identical to SEQ ID NO: 588

SEQ ID NO: 590 - protein, 535 aa, Triticum aestivum; identical to SEQ ID NO: 588

SEQ ID NO: 591 - protein, 519 aa, Triticum aestivum
MATASFEERTTSPPSRSWSPHAAIAAATERIRAGTLSREDAHHLFDELLRQATPVPSRSLNGLLAALARVPAPAACIRDGPALALGLFNRVCRDEAGARVAPPTVFTYGILMHCCCCAHRPDLGLALFGRFLRTGLKTNEIIATTFLKCLCYAKRTDEALNVLLHRMSELGCVPDAISYNIVLKSLCEDSMSQRALDLLQMMAKEGGGCSPNVVAYSTVIHGFFKEGETGKACNLFHEMMQQDVEPNVWTYSSIIDALCNARAMDKAELVLQQMVNKGVQPNNVTYNCMIHGYSTSGRWKEAAKLFREMKSRGLIPDTSTCNALMTYHCKHGRSKEAAEFFDAMTAKGHRDVISYCILLHGYANEGCFADMIDLFNSMESNGFVADCHVFTILIDAYAKRGMMDEAMLIFTEMREKGVSPNVVTYSTVIAALCRLGRLSDAMDRFNEMTDMGVQPNTAVYHSLIQGFCMHGDLVKVKEFVSEMMNKGIPRPDIAFFTSVINSLCKEGRVMNAQVSLTWL

SEQ ID NO: 592 - protein, 596 aa, Triticum aestivum
MWWHIAVIHGFFKEGETSKACNLFHEMMQQGVEPSVWTYSSIIDALCKARAMDKAELVLQQMVNKGVQPNNVTYNCMIHGYSTSGRWKEAAKLFREMKSQGLIPDTFTCNALMTYLCKHGRSKEGAEISDAMTAKGHKPDIVSYSILLHGYANEGCFADMIDLFNSMERNGIAADCHVFSILINGYAKCGMTDEAMLIFTEMWEKGVSPDVVTYSTVIAALSRMGRLTDAMEKFNQMIAMGIQPNTAIYHSLIQGFCIDGDLVKAKQLVSEMMNRGIPRPNIVFFNLVINSLCKEGRVMDAHDVLDLVIGIGERPNVITFNSLIDGYCLVGKMDKAFKILDVMKSVGVESDVVTYSALLDGYSKNRRIDDALTLFREMPHKRIKSDTVTYGIVLDGLFHAGRTVAAMKMFHEMIKSGTTVSIYTYSIILGGLCRNNCVDDAIALFQKLRSMNVKFNIEILNTMINAMYKVQRKEEAKDLFTTISANGLVPSESTYAVMIRNLLKDGAVEDADNMFSSMDNSGIVPSSHLINDIIRMLLEKGEIAKAGNYLSKVDGKSISLEASTTSLMLSLFSRKGKHQEDIKLLPAKYQIFDGFS

SEQ ID NO: 593 - protein, 586 aa, Triticum aestivum
MSNLRLLRRSSSSMSTTTSPPSRSWSPHSAFAAATERVRARTLSQDDAHHLFDELLRQATPVHERSLNGFLAALARATSSAACIRDGPALAIALFNRVCREQAGPRVAPLTVHTYGILMECCCRAGHPELGLAIFSRLLRTGLKTNEIVGSTFLKCLSYAKRTDEALNVLLHRMPELGCVPNAFSYSIVLKSLCNNSMSQRALDLLQRMAKEGGGCFLNVVTHSTVIHGFFKEGEIGKACTLFHEMMQQGVVPNVWTYNSIIDALCKARAMDKAELVLRQMVAKGAQPDTVTYNCLINGYATSGRLKEAAKMFREMKSRGLTPNIVTCGSLTTSLCKHGRSKEAREIFDSMTSKGHRANVVSYSILLHGYANEGCFADMIYLFNSMKSNGIAADCRVFNILINGYAKRGMMDEAVLIFTEMREKGVSPDVVTYTTVIAALSRMGRLTDAVDEFDEMIAMGVQPSIPVYQSLIQGFCIDGDLVKAKELVSEMMNKGIPCPNIVFFNSVINSLCKEERVMDAHDIFDLVIDIGERPDTITFSSLIDGYCLVGKMDKAFGMLNAMELVGVEPDCNAFDAAISPTCRSTT

SEQ ID NO: 594 - protein, 584 aa, Triticum aestivum
MSRRFVPVGRHILEQNIKARYHAGDIGTEDALHLFDELLQVAGRSSIHAINCLLTVVGRDCPALGVSLFNRVARSKVAPCSITYAILVDCCCRAGRQDLGHTAMGHVIKMGFLADAIITFSHLLKAICAENKTSYAMDIVLQEMDISSIFDRIFQEMSRNGVQPDIVTYTIQMDYLCKSGRCTEARKIFDSMISLGQKPTVTTYSILLHGYAMEKSFHDMLCLIDLMVGNGIVPDHYVYNILISAYAKEEMVGEVMHIFTKMRQQGLNPDAVSYGTVIDLLSRIGRMDDAMSLFNQMITEGLAPGIIVFNHLISGFCTCGKWEKVHELFSEMLDCGICPDTVFFNTVMDRLCKNGRVTEAQDLFDLMVHMGVKPDVCTYNTLMGGYLFVGKMDEVSKLLDNMVSIGMEPDVITYNILIDGYSKNGRIDDALVVFREMLDTKGKPSVISFNIMIGALLKCGRKAEAKDLFDGIWANGLVPDIVTYSLMIQKLIEEGSLQESDDLFVSMEKNGCAANSRMLNAIVRSLLQKGEVPRAGTYLSKIDERSFILEASTASLLTALASRGKGQEYKELLPEKYSELLIEA

SEQ ID NO: 595 - protein, 584 aa, Triticum aestivum; identical to SEQ ID NO: 594

SEQ ID NO: 596 - protein, 584 aa, Triticum aestivum; identical to SEQ ID NO: 594

SEQ ID NO: 597 - protein, 545 aa, Triticum aestivum
  SITE 479: note = misc_feature - Xaa can be any naturally occurring amino acid
MSRRFPPVGRRILERRIEERYSARDIGTDDTLNLFDELIQVAGPSSVRAINCLLTVVGRDCPALGVSLFNRVARAKVPPHNITYGILVDCCCRAGRLDLGHAAMGHVIKLGFTAEAIVNFSHLLKAICAVKKTSYAMDIVLRVMPEFNCTPNIFSYSILFKGLCNERRSQEALELINIMVEDGGSCQPDVVTYNTVIDGLLKEGEVDQAYSLFSEMLRQGVSPNVVTCNSIISGMCKLHAMDKAEEVLQQMLDRRILPDVATYNSLIHGYYSLGQCEEVDRIFKEMTTNGVQPDVVTYNIQMDYLCKNGRCAEARKIFDSMISLGQKPTVTTYNILLHGYAMERSFHDMNCLIELMDDNGISPDHYGYNILISAYAKEKMVDDVLHIFTKMRQQGLNPDVANYGAVINLLSSIGRMDDAMSQYNQMINEGLAPDIIVFNSLISGFCSCGKWEKVHELFSEMLDRGICPNTVFFTTIMDXLCKNGRVIEAQDVFDLMVHMGVKPDVRSHVTLMHGYFADGKMDEMRKLLENMCSIGLKLMLSPIAY

SEQ ID NO: 598 - protein, 511 aa, Triticum aestivum
MSRRFPPVGRRILERRIEERYSARDIGTDDTLNLFDELIQVAGPSSVRAINCLLTVVGRDCPALGVSLFNRVARAKVPPHNITYGILVDCCCRAGRLDLGHAAMGHVIKLGFTAEAIVNFSHLLKAICAVKKTSYAMDIVLRVMPEFNCTPNIFSYSILFKGLCNERRSQEALELINIMVEDGGSCQPDVVTYNTVIDGLLKEGEVDQAYSLFSEMLRQGVSPNVVTCNSIISGMCKLHAMDKAEEVLQQMLDRRILPDVATYNSLIHGYYSLGQCEEVDRIFKEMTTNGVQPDVVTYNIQMDYLCKNGRCAEARKIFDSMISLGQKPTVTTYNILLHGYAMERSFHDMNCLIELMDDNGISPDHYGYNILISAYAKEKMVDDVLHIFTKMRQQGLNPDVANYGAVINLLSSIGRMDDAMSQYNQMINEGLAPDIIVFNSLISGFCSCGKWEKVHELFSEMLDRGICPNTVFFTTIMDRLCKNGRVMEAQDLFQADRRRRPGNVSQVEGDP

SEQ ID NO: 599 - protein, 593 aa, Triticum aestivum
  SITE 508: note = misc_feature - Xaa can be any naturally occurring amino acid
MVSIGEHARPPNSAFLLPNPSSCPGCAGAVGGERRRRPLGPLPLPDSSRSISGAMSRRAVPAGRRILEQNIKARYRAGAIGTDDALHLFDELLQVAWPSSIAAINCLLIVVGRDCPVLAVSLFNHIARAKVAPHNITYGILVDCCSRAGRLDLGFAAMGHIVKMGFVARSVVSFSHLLRAVCAKKKTSYRMDIMLQIMPELNCIPDVYSYSILFKGLCNEKRSQEALELIHVMVEHGGSCQPNLVSYNTVIDGLLKEGEVGKAYSLFCEMVQSGILANIVTYNSIISGMCKVHAMDKAEKVLQQMFDREILPDTATYTTLIRGYYSSGQCKEVERVFEHMSINGVQPNMITCNIQMDYLCKSGRCAEARKIFDSMVSLGQKPSVTTYSILLHGYVMEKSFHDMHCLLDLMVENGISPDHHVYNILISAYAKEEMASEVMHIFTKMRQQGLNPSVADYGAVINLLSSIGRMDDAMSQFNQMIAEGLAPDIIVFNPLISGFCTCGKWEKXHELFSEMLNRGTYHDTVFFTTIMDRLCKNGRVMEAQDMFDLMVHVGVKPNVHTYATLMHGYFFVRKMDEVRKLLGNILSIGSKPD

SEQ ID NO: 600 - protein, 593 aa, Triticum aestivum
MVSIGEHARPPNSAFLLPNPSSCPGCAGAVGGERRRRPLGPLPLPDSSRSISGAMSRRAVPAGRRILEQNIKARYRAGAIGTDDALHLFDELLQVAWPSSIAAINCLLIVVGRDCPVLAVSLFNHIARAKVAPHNITYGILVDCCSRAGRLDLGFAAMGHIVKMGFVARSVVSFSHLLRAVCAKKKTSYRMDIMLQIMPELNCIPDVYSYSILFKGLCNEKRSQEALELIHVMVEHGGSCQPNLVSYNTVIDGLLKEGEVGKAYSLFCEMVQSGILANIVTYNSIISGMCKVHAMDKAEKVLQQMFDREILPDTATYTTLIRGYYSSGQCKEVERVFEHMSINGVQPNMITCNIQMDYLCKSGRCAEARKIFDSMVSLGQKPSVTTYSILLHGYVMEKSFHDMHCLLDLMVENGISPDHHVYNILISAYAKEEMASEVMHIFTKMRQQGLNPSVADYGAVINLLSSIGRMDDAMSQFNQMIAEGLAPDIIVFNPLISGFCTCGKWEKFHELFSEMLNRGTYHDTVFFTTIMDRLCKNGRVMEAQDMFDLMVHVGVKPNVHTYATLMHGYFFVRKMDEVRKLLGNILSIGSKPD

SEQ ID NO: 601 - protein, 593 aa, Triticum aestivum; identical to SEQ ID NO: 600

SEQ ID NO: 602 - protein, 254 aa, Triticum aestivum
  SITE 44: note = misc_feature - Xaa can be any naturally occurring amino acid
MSINGVQPNMITYNIQMDYLCKSGRCAEARKIFDSMVSLGQKPXVTTYSILLHGYVMEKSFHDMHCLLDLMVENGISPDHHVYNILISAYAKEEMASEVMHIFTKMRQQGLNPSVADYGAVINLLSSIGRMDDAMSQFNQMIAEGLAPDIIVFNPLISGFCTCGKWEKVHELFSEMLNRGTYPDTVFFTTIMDRLCKNGRVMEAQDMFDLMVHVGVKPNVHTYATLMHGYFFVRKMDEVRKLLGNMLSIGSKPD

SEQ ID NO: 603 - protein, 593 aa, Triticum aestivum; identical to SEQ ID NO: 600

SEQ ID NO: 604 - protein, 593 aa, Triticum aestivum
MVSIGEHARPPNSAFLLPNPSSCLGCVGAVGGERHRRPLGPLRLPDSSRSIGGAMSRRTVPAGRRILEQNIKARYRAGAIGTDDALHLFDELLQVAWPSSIAAINCLLIVVGRDCPALAVSLFNHIARAKVAPHNITYGILVDCCSHAGRLDLGFAAMGHIVKTVFAAGSIVSFSHLLRAVCAEKKTSYGMDIVLRIMPELNCIPDVYSYSMLFKGLCNEKRSQEALEMIHVMVEHGGSCQPNLVSYNAVIDGLLKEGEVGKAYILFCEMVQSGILANIVTYNSIISGMCKVHAMDKAEKVLQQMFDREILPDTATYTSLIHGCYSSGQCKEVERVFEHMSINGVQPNMITYNIQMDYLCKSGRCAEARKIFDSMVSLGQKPSVTTYSILLHGYVMEKSFHDMHCLLDLMVENGISPDHHVYNILISAYAKEEMASEVMHIFTKMRQQGLNPSVADYGAVINLHSSIGRMDDAMPQFNQMIAEGLAPDIIVFNPLISGFCTCGKWEKVHELFSEMLNRGTYHDTVFFTTIMDRLCKNGRVMEAQDMFDLMVHVGVKPNVHTYATLMHGYFFVRKMDEVRKLLGNMLSIGSKPD

SEQ ID NO: 605 - protein, 593 aa, Triticum aestivum
MVSIGEHARPPNSAFLLPNPSSCPGCVGAVGGERHRRPLGPLPLPDSSRSIGGAMSRRAVPAGRRILEQNIKARYRAGAIGTDDALHLFDELLQVAWPSSIAAINCLLIVVGRDCPALAVSLFNHIARAKVAPHNITYGILVDCCSRAGRLDLGFAAMGHIVKTGFAAGSVVSFSHLLRAVCAEKKTSYGMDIVLRIMPELNCIPDVYSYSILFKGLCNEKRSQEALELIHVMVEHGGSCQPNLVSYNTVIDGLLKEGEVGKAYSLFCEMVQSGILANIVTYNSIISGMCKVHAMDKAEKVLQQMFDREILPDTATYTSLIHGYYSSGQCKEVERVFEHMSINGVQPNMITYNIQMDYLCKSGRCAEARKIFDSMVSLGQKPSVTTYSILLHGYVMEKSFHDMHCLLDFMVENGISPDHHVYNILISAYAKEEMASEVMHIFTKMRQQGLNPSVADYGAVINLLSSIGRMDDAMSQFNQMIAEGLAPDIIVFNPLISGFCTCGKWEKVHELFSEMLNRGTYHDTVFFTTIMDRLCKNGRVMESQDMFDLMVHVGVKPNVHTYATLMHGYFFVRKMDEVRKLVGNMLSIGSKPD

SEQ ID NO: 606 - protein, 593 aa, Triticum aestivum
MVSIGEHARPPNSAFLLPNPSSCLGCVGAVGGERHRRPLGPLRLPDSSRSIGGAMSRRAVPAGRRILEQNIKARYRAGAIGTDDALHLFDELLQVAWPSSIAAINCLLIVVGRDCPALAVSLFNHIARAKVAPHNITYGILVDCCSHAGRLDLGFAAMGHIVKTVFAAGSIVSFSHLLRAVCAEKKTSYGMDIVLRIMPELNCIPDVYSYSMLFKGLCNEKRSQEALEMIHVMVEHGGSCQPNLVSYNAVIDGLLKEGEVGKAYILFCEMVQSGILANIVTYNSIISGMCKVHAMDKAEKVLQQMFDREILPDTATYTSLIHGCYSSGQCKEVERVFEHMSINGVQPNMITYNIQMDYLCKSGRCAEARKIFDSMVSLGQKPSVTTYSILLHGYVMEKSFHDMHCLLDLMVENGISPDHHVYNILISAYAKEEMASEVMHIFTKMRQQGLNPSVADYGAVINLHSSIGRMDDAMPQFNQMIAEGLAPDIIVFNPLISGFCTCGKWEKVHELFSEMLNRGTYPDTVFFTTIMDRLCKNGRVMEAQDMFDLMVHVGVKPNVHTYATLMHGYFFVRKMDEVRKLLGNMLSIGSKPD

SEQ ID NO: 607 - protein, 593 aa, Triticum aestivum
MVSIGEHARPPNSAFLLPNPSSCPGCVGAVGGERHRRPLGPLPLPDSSRSIGGAMSRRAVPAGRRILEQNIKARYRAGAIGTDDALHLFDELLQVAWPSSIAAINCLLIVVGRDCPALAVSLFNHIARAKVAPHNITYGILVDCCSHAGRLDLGFAAMGHIVKTVFATGSIVSFSHLLRAVCAEKKTSYGMDIVLRIMPELNCIPDVYSYSMLFKGLCNEKRSQEALEMIHVMVEHGGSCQPNLVSYNAIIDGLLKEGEVGKAYSLFCEMVQSGILANIVTYNSIISGMCKVHAMDKAEKVLQQMFDREILPDTATYTSLIHGCYSSGQCKEVERVFEHMSINGVQPNMITYNIQMDYLCKSGRCTEARKIFDSMVSLGQKPSVTTYSILLHGYVMEKSFHDMHCLLDLMVENGISPDHHVYNILISAYAKEEMASEVMHIFTKMRRQGLNPSVADYGAVINLLSSIGRMDDAMPQFNQMIAEVLAPDIIVFNPLISGFCTCGKWEKVHELFSEMLNRGTYPDTVFFTTIMDRLCKNGRVMEAQDMFDLMVHVGVKPNVHTYATLMHGYFFVRKMDEVRKLLGNMLSIGSKPD

SEQ ID NO: 608 - protein, 593 aa, Triticum aestivum
MVSIGEHARPPNSTFLLPNPSSCPGCAGAVGGERHRRPLGPLPLPDSSRSIGGAMSRRAVPAGRRILEQNIKARYRAGAIGTDDALHLFDELLQVAWPSSIAAINCLLIVVGRDCPTLAVSLFNHIARAKVAPHNITYGILVDCCSRAGRLDLGFAAMGHIVKTGFAAGSVVSFSHLLRAVCAEKKTSYGMDIVLRIMPELNCIPDVYSYSILFKGLCNEKRSQEALELIHVMVEHGGSCQPNLVSYNTVIDGLLKEGEVGKAYSLFCEMVQSGILANIVTYNSIISGMCKVHAMDKAEKVLQQMFDREILPDTATYTSLIHGYYSSGQCKEVERVFEHMSINGVQPNMITYNIQMDYLCKSGRCAEARKIFDSMVSLGQKPFVTTYSILLHGYVMEKSFHDMHCLLDLMVENGISPDHHVYNILISAYAKEEMASEVMHIFTKMRQQGLNPSVADYGAVINLLSSIGRMDDAMSQFNQMIAEGLAPDIIVFNPLISGFCTCGKWEKVHELFSEMLNRGTYPDTVFFTTIMDRLCKNGRVMEAQDMFDLMVHVGVKPNVHTYATLMHGYFFVRKMDEVRKLLGNMLSIGSKPD

SEQ ID NO: 609 - protein, 593 aa, Triticum aestivum
  SITE 423: note = misc_feature - Xaa can be any naturally occurring amino acid
MVSIGEHARPPNSAFLLPNPSSCPGCAGAVGGERRRRPLGPLPLPDSSRSIGGAMSRRAVPAGRRILEQNIKARYRAGAIGTDDALHLFDELLQVAWPSSIAAINCLLIGVGRDCPALAVSLFNHIARAKVAPHNITYGILVDCCSRAGRLDLGFAAMGHIVKTGFAAGSVVSFSHLLRAVCAKKKTSYGMDIVLRIMPELNCIPDVYSYGILFKGLCNEKRSQEALELIHVMVEHGGSCQPNLVSYNTVIDGLLKEGEVGKAYILFCEMVQSGILANLVTYNSIISGMCKVHAMDKAEKVLQQMFDREILPDTATYTSLIHGYYSSGQCKEVERVFEHMSINGVQPNMITYNIQMDYLCKSGRCAEARKIFDSMVSLGQKPSVTTYSILLHGYVMEKSFHDMHCLLDLMVENGISPDHHVYXILISAYAKEEMASEVMHIFTKMRQQGLNPSVADYGAVINLLSSIGRMDDAMSQFNQMIAEGLAPDIIVFNPLISGFCTCGKWEKVHELFSEMLNRGTYPDTVFFTTIMDRLCKNGRVMEAQDKFDLMVHMGVKPNVHTYATLMHRYFFVMKMDEVRKLLGNMLSIGSKPD

SEQ ID NO: 610 - protein, 593 aa, Triticum aestivum
MVSIGEHARPPNSAFLLPNPSSCPGCVGAVGGERHRRPLGPLPLPDSSRSIGGAMSRRAVPAGRRILEQNIKARYRAGAIGTDDALHLFDELLQVAWPSSIATINCLLIVVGRDCPALAVSLFNHIARANVAPHNITYGILVDCCSRAGRLDLGFAAMGHIVKTGFAAGSVISFSHLLRAVCAEKKTSYGMDIVLRIMPELNCIPDVYSYSILFKGLCNEKRSQEALELIHVMVEHGGSCQPNLVSYNTVIDGLLKEGEVGKAYSLFCEMVQSGILANIVTYNSIISGMCKVHAMDKAEKVLQQMFDREILPDTATYTSLIHGYYSSGQCKEVERVFEHMSINGVQPNMITYNIQMDYLCKSGRCAEARKIFDSMVSLGQKPSVTTYSILLHGYVMEKSFHDMHCLLDFMVENGISPDHHVYNILISAYAKEEMASEVMHIFTKMRQQGLNPSVADYGAVINLLSSIGRMDDAMSQFNQMIAEGLAPDIIVFNPLISGFCTCGKWEKVHELFSEMLNRGTYHDTVFFTTIMDRLCKNGRVMESQDMFDLMVHVGVKPNVHTYATLMHGYFFVRKMDEVRKLVGNMLSIGSKPD

SEQ ID NO: 611 - protein, 593 aa, Triticum aestivum
MVSIGEHARPPNSAFLLPNPSSCPGCAGAVGGERRRRPLGPLPLPDSSRSIGGAMSRRAVPAGRCILEQNIKARYRAGAIGTDDALHLFDELLQVAWPSSIAAINCPLIVVGRDCPALAVSLFNHIARAKVAPHNITYGILVDCCSRAGRLDLGFAAMGHIVKTGFAAGSVVSFSHLLRAVCAKKKTSYGMDIVLRIMPELNCIPDVYSYGILFKGLCNEKRSQEALELIHVMVEHGGSCQPNLVSYNTIIDGLLKEGEVGKAYILFCEMVQSGILANIVTYNSIISGMCKVHAMDKAEKVLQQMFDREILPDTATYTSLIHGYYSSGQCKEVERVFEHMSINGVQPNMITYNIQMDYLCKSGRCAEARKIFDSMVSLGQKPSVTTYSILLHGYVMEKSFHDMHCLLDLMVENGISPDHHVYKILISAYAKEEMASEVMHIFTKMRQQGLNPSVADYGAVINLLSSIGRMDDAMSQFNQMIAEGLAPDIIVFNPLISGFCTCGKWQKVHELFSEMLNRGTYPDTVFFTTIMDCICKNGRVMEAQDMFDLMVHVGVKPNVHTYATLMHGYFFVRKMDEVRKLLGNMLSIGSKPD

SEQ ID NO: 612 - protein, 593 aa, Triticum aestivum
MVSIGEHARPPNSAFLLPNPSSCPGCAGAVGGERRRRPLGPLPLPDSSRSIGGAMSRRAVPAGRRILEQNIKARYRAGAIGTDDALHLFDELLQVAWPSSIAAINCLLIVVGRDCPALAVSLFNHIARAKVAPHNITYGILVDCCSRAGRLDLGFAAMGHIVKTGFAAGSVVSFSHLLRAVCAEKKTSYGMDIVLRIMPELNCIPDVYSYSILFKGLCNEKRSQEALELIHVMVEHGGSCQPNLVSYNTVIDGLLKEGEVGKAYSLFCEMVQSGILANIVTYNSIISGMCKVHAMDKAEKVLQQMFDREILPDTATYTSLIHGYYSSGQCKEVERVFEHMSINGVQPNMITYNIQMDYLCKSGRCAEARKIFDSMVSLGQKPFVTTYSILLHGYVMEKSFHDMHCLLDLMVENGISPDHHVYNILISAYAKEEMASEVMHIFTKMRQQGLNPSVADYGAVINLLSSIGRMDDAMSQFNQMIAEGLAPDIIVFNPLISGFCTCGKWEKVHELFSEMLNRGTYPDTVFFTTIMDRLCKNGRVMEAQDMFDLMVHVGVKPNVHTYATLMHGYFFVRKMDEVRKLLGNMLSIGSKPD

SEQ ID NO: 613 - protein, 593 aa, Triticum aestivum
MVSIGEHARPPNSAFLLPNPSSCPGCVGAVGGERHRRPLGPLPLPDSSRSIGGAMSRRAVPAGRRILEQNIKARYRAGAIGTDDALHLFDELLQVAWPSSIAAINCLLIVVGRDCPALAVSLFNHIARAKVAPHNITYGILVDCCSRAGRLDLGFAAMGHIVKTGFAAGSVVSFSHLLRAVCAEKKTSYGMDIVLRIMPELNCIPDVYSYSILFKGLCNEKRSQEVLELIHVMVEHGGSCQPNLVSYNTVIDGLLKEGEVGKAYSLFCEMVQSGILANIVTYNSIISGMCKVHAMDKAEKVLQQMFDREILPDTATYTSLIHGCYSSGQCKEVERVFEHMSINGVQPNMITYNVQMDYLCKSGRCAEARKIFDSMVSLGQKPSVTTYSILLHGYVMEKSFHDMHCLLDLMVENGISPDHHVYNILISAYAKEEMASEVMHIFTKMRQQGLNPSVADYGAVINLLSSIGRMDDAMSQFNQMIAEGLAPDIIVFNPLISGFCTCGKWEKVHELFSEMLNRGTYPDTVFFTTIMDRLCKNGRVMEAQDMFDLMVHVGVKPNVHTYATLMHGYFFVRKMDEVRKLLGNMLSIGSKPD

SEQ ID NO: 614 - protein, 593 aa, Triticum aestivum
MVSIGEHARPPNSAFLLPNPSSCPGCVGAVGGERHRRPLGPLPLPDSSRSIGGAMSRRAVPAGRRILEQNIKARYRAGAIGTDDALHLFDELLQVAWPSSIAAINCLLIVVGRDCPALAVSLFNHIARAKVAPHNITYGILVDCCSHAGRLDLGFAAMGHIVKTVFATGSIVSFSHLLRAVCAEKKTSYGMDIVLRIMPELNCIPDVYSYSMLFKGLCNEKRSQEALEMIHVMVEHGGSCQPNLVSYNAIIDGLLKEGEVGKAYSLFCEMVQSGILANIVTYNSIISGMCKVHAMDKAEKVLQQMFDREILPDTATYTSLIHGCYSSGQCKEVERVFEHMSINGVKPNMITYNIQMDYLCKSGRCTEARKIFDSMVSLGQKPSVTTYSILLHGYVMEKSFHDMHCLLDLMVENGISPDHHVYNILISAYAKEEMASEVMHIFTKMRRQGLNPSVADYGAVINLLSSIGRMDDAMPQFNQMIAEVLAPDIIVFNPLISGFCTCGKWEKVHELFSEMLNRGTYPDTVFFTTIMDRLCKNGRVMEAQDMFDLMVHVGVKPNVHTYATLMHGYFFVRKMDEVRKLLGNMLSIGSKPD

SEQ ID NO: 615 - protein, 593 aa, Triticum aestivum
MVSIGEHARPPNSAFLLPNPSSCPGCAGAVGGERRRRPLGPLPLPDSSRSIGGAMSRRAVPAGRRILEQNIKARYRAGAIGTDDALHLFDELLQVAWPSSIAAINCLLIVVGRDCPALAVSLFNHIARAKVAPHNITYGILVDCCSRAGRLDLGFAAMGHIVKTGFAVGSIVSFSHLLRAVCAKKKTSYGMDIVLRIMPELNCIPDVYSYSILFKGLCNEKRSQEALELIHVMVEHGGSCQPNLVSYNTVIDGLLKEGEVGKAYILFCEMVQSGILANIVTYNSIISGMCKVHAMDKAEKVLQQMFDREILPDTATYTSLIHGYYSSGQCKEVERVFEHMSINGVQPNMITYNIQMDYLCKSGRCAEARKIFDSMVSLGQKPSVTTYSILLHGYVMEKSFHDMHCLLDLMVENGISPDHHVYNILISAYAKEEMASEVMHIFTKMRQQGLNPSVADYGAVINLLSSIGRMDDAMSQFNQMIAEGLAPNIIVFNPLISGFCTCGKWEKVHELFSEMLNRGTYPDTVFFTTIMDRLCKNGRVMEAQDMFDLMVHMGVKPNVHTYATLMHRYFFVRKMDEVRKLLGNMLSIGSKPD

SEQ ID NO: 616 - protein, 593 aa, Triticum aestivum
MVSIGEHARPPNSAFLLPNPSSCPGCAGAVGGERRRRPLGPLPLPDSSRSIGGAMSRRAVPAGRRILEQNIKARYRAGAIGTDDALHLFDELLQVAWPSSIAAINCLLIGVGRDCPALAVSLFNHIARAKVAPHNITYGILVDCCSRAGRLDLGFAAMGHIVKTGFAAGSVVSFSHLLRAVCAKKKTSYGMDIVLRIMPELNCIPDVYSYGILFKGLCNEKRSQEALELIHVMVEHGGSCQPNLVSYNTVIDGLLKEGEVGKAYILFCEMVQSGILANLVTYNSIISGMCKVHAMDKAEKVLQQMFDREILPDTATYTSLIHGYYSSGQCKEVERVFEHMSINGVQPNMITYNIQMDYLCKSGRCAEARKIFDSMVSLGQKPSVTTYSILLHGYVMEKSFHDMHCLLDLMVENGISPDHHVYKILISAYAKEEMASEVMHIFTKMRQQGLNPSVADYGAVINLLSSIGRMDDAMSQFNQMIAEGLAPDIIVFNPLISGFCTCGKWEKVHELFSEMLNRGTYPDTVFFTTIMDRLCKNGRVMEAQDKFDLMVHMGVKPNVHTYATLMHRYFFVMKMDEVRKLLGNMLSIGSKPD

SEQ ID NO: 617 - protein, 593 aa, Triticum aestivum
MVSIGEHARPPNSAFLLPNPSSCPGCAGAVGGERRRRPLGPLPLPDSSRSIGGAMSRRAVPAGRRILEQNIKARYRAGAIGTDDALHLFDELLQVAWPSSIAAINCLLIVVGRDCPALAVSLFNHIARAKVAPHNITYGILVDCCSRAGRLDLGFAAMGHIVKTGFAAGSVVSFSHLLRAVCAEKKTSYGMDIVLRIMPELNCIPDVYSYSILFKGLCNEKRSQEVLELIHVMVEHGGSCQPNLVSYNTVIDGLLKEGEVGKAYSLFCEMVQSGILANIVTYNSIISGMCKVHAMDKAEKVLQQMFDREILPDTATYTSLIHGCYSSGQCKEVERVFEHMSINGVQPNMITYNVQMDYLCKSGRCAEARKIFDSMVSLGQKPSVTTYSILLHGYVMEKSFHDMHCLLDLMVENGISPDHHVYNILISAYAKEEMASEVMHIFTKMRQQGLNPSVADYGAVINLLSSIGRMDDAMSQFNQMIAEGLAPDIIVFNPLISGFCTCGKWEKVHELFSEMLNRGTYPDTVFFTTIMDRLCKNGRVMEAQDMFDLMVHVGVKPNVHTYATLMHGYFFVRKMDEVRKLLGNMLSIGSKPD

SEQ ID NO: 618 - protein, 593 aa, Triticum aestivum; identical to SEQ ID NO: 611

SEQ ID NO: 619 - protein, 191 aa, Triticum aestivum
MHCLLDLMVENGISPDHHVYNILISAYAKEEMASEVMHIFTKIRQQGLNPSVADYGAVINLLSSIGRMDDAMSQFNQMIAEGLAPDIIVFNPLISGFCTCGKWEKVHELFSEMLNRGTYPDTVFFTTIMDRLCKNGRVMEAQDMFDLMVHVGVKPNVHTYATLMHGYFFVRKMDEVRKLLGNMLSIGSKPD

SEQ ID NO: 620 - protein, 245 aa, Triticum aestivum
  SITE 35: note = misc_feature - Xaa can be any naturally occurring amino acid
MITYNIQMDYLCKSGRCAEARKIFDSMVSLGQKPXVTTYSILLHGYVMEKSFHDMHCLLDLMVENGISPDHHVYNILISAYAKEEMASEVMHIFTKMRQQGLNPSVADYGAVINLHSSIGRMDDAMPQFNQMIAEGLAPDIIVFNPLISGFCTCGKWEKVHELFSEMLNRGTYPDTVFFTTIMDRLCKNGRVMEAQDMFDLMVHVGVKPNVHTYATLMHGYFFVRKMDEVRKLLGNMLSIGSKPD

SEQ ID NO: 621 - protein, 593 aa, Triticum aestivum
MVSIGEHARPPNSAFLLPNPSSCPGCAGAVGGERRRRPLGPLPLPDSSRSIGGAMSRRAVPAGRRILEQNIKARYRAGAIGTDDALHLFDELLQVAWPSSIAAINCLLIVVGRDCPALAVSLFNHIARAKVAPHNITYGILVDCCSRAGRLDLGFAAMGHIVKTGFAVGSIVSFSHLLRAVCAKKKTSYGMDIVLRIMPELNCIPDVYSYSILFKGLCNEKRSQEALELIHVMVEHGGSCQPNLVSYNTVIDGLLKEGEVGKAYILFCEMVQSGILANIVTYNSIISGMCKVHAMDKAEKVLQQMFDREILPDTATYTSLIHGYYSSGQCKEVERVFEHMSINGVQPNMITYNIQMDYLCKSGRCAEARKIFDSMVSLGQKPSVTTYSILLHGYVMEKSFHDMHCLLDLMVENGISPDHHVYNILISAYAKEEMASEVMHIFTKMRQQGLNPSVADYGAVINLLSSIGRMDDAMSQFNQMIAEGLAPDIIVFNPLISGFCTCGKWEKVHELFSEMLNRGTYPDTVFFTTIMDRLCKNGRVMEAQDMFDLMVHVGVKPNVHTYATLMHGYFFVRKMDEVRKLLGNMLSIGSKPD

SEQ ID NO: 622 - protein, 448 aa, Triticum aestivum
  SITE 428: note = misc_feature - Xaa can be any naturally occurring amino acid
  SITE 436: note = misc_feature - Xaa can be any naturally occurring amino acid
MGHIVKTGFAAGSVVSFSHLLRAVCAEKKTSYGMDIVLRIMPELNCIPDVYSYSILFKGLCNEKRSQEVLELIHVMVEHGGSCQPNLVSYNTVIDGLLKEGEVGKAYSLFCEMVQSGILANIVTYNSIISGMCKVHAMDKAEKVLQQMFDREILPDTATYTSLIHGCYSSGQCKEVERVFEHMSINGVQPNMITYNVQMDYLCKSGRCAEARKIFDSMVSLGQKPSVTTYSILLHGYVMEKSFHDMHCLLDLMVENGISPDHHVYNILISAYAKEEMASEVMHIFTKMRQQGLNPSVADYGAVINLLSSIGRMDDAMSQFNQMIAEGLAPDIIVFNPLISGFCTCGKWEKVHELFSEMLNRGTYPDTVFFTTIMDRLCKNGRVMEAQDMFDLMVHVGVKPNVHTYATLMHGYFFVRKMDEVRKLLGNXLSIGSKPXLGVLCFKVSARP

SEQ ID NO: 623 - protein, 593 aa, Triticum aestivum
MVSIGEHARPPNSAFLLPNPSSCPGCAGAVGGERRRRPLGPLPLPDSSRSIGGAMSRRAVPAGRRILEQNIKARYRAGAIGTDDALHLFDELLQVAWPSSIAAINCLLIVVGRDCPALAVSLFNHIARAKVAPHNITYGILVDCCSRAGRLDLGFAAMGHIVKTGFAAGSVVSFSHLLRAVCAEKKTSYGMDIVLRIMPELNCIPDVYSYSILFKGLCNEKRSQEVLELIHVMVEHGGSCQPNLVSYNTVIDGLLKEGEVGKAYSLFCEMVQSGILANIVTYNSIISGMCKVHAMDKAEKVLQQMFDREILPDTATYTSLIHGCYSSGQCKEVERVFEHMSINGVQPNMITYNVQMDYLCKSGRCAEARKIFDSMVSLGQKPSVTTYSILLHGYVMEKSFHDMHCLLDLMVENGISPDHHVYNILISAYAKEEMASEVMHIFTKMRQQGLNPSVADYGAVINLISSIGRMDDAMSQFNQMIAEGLAPDIIVFNPLISGFCTCGKWEKVHELFSEMLNRGTYPDTVFFTTIMDRLCKNGRVMEAQDMFDLMVHVGVKPNVHTYATLMHGYFFVRKMDEVRKLLGNMLSIGSKPD

SEQ ID NO: 624 - protein, 254 aa, Triticum aestivum
MSINGVQPNMITYNIQMDYLCKSGRCAEARKIFDSMVSLGQKPSVTTYSILLHGYVMEKSFHDMHCLLDLMVENGISPDHHVYNILISAYAKEEMASEVMHIFTKMWQQGLNPSVADYGAVINLLSSIGRMDDAMSQFNQMIAEGLAPDIIVFNPLISGFCTCGKWEKVHELFSEMLNRGTYPDTVFFTTIMDRLCKNGRVMEAQDMFDLMVHVGVKPNVHTYATLMHGYFFVRKMDEVRKLLGNMLSIGSKPD

SEQ ID NO: 625 - protein, 593 aa, Triticum aestivum
MVSIGEHARPPNSAFLLPNPSSCPGCASAVGGERRRRPLGPLPLPDSSRSIGGSMSRRAVPAGRRILEQNIKARYRAGAIGTDDAHHLFDELLQVAWPSSIATINCLLIVVGRDCPALAISLFNHIARAKVAPHNITYGILVDCCSRAGRLDLGFTAMGHIVKTGFAAGSVVSFSHLLRAVCAEKKTSYGMDIVLRIMPELNCIPDVYSYSTLFKGLCNEKRSQEALELIHVMVEHGGSCQPNLVSYNTVIDGLLKEGEVGKAYSLFCEMVQSGILANIVTYNSIIFDMCKVHAMDKAEKVLQQMFDREILPDTATYTSLIHGYYSSGQCKEVERVFEHMSINGVQPNMITYNIQMDYLCKSGRCAEARKIFDSMVSLGQKPSVTTYSILLHGYVMEKSFHDMHCLLDLMVENGISPDHHVYNILISAYAKEEMASEVMHIFTKMRQQGLNPSVADYGAVINLLSSIGRMDDAMSQFNQMIAEGLAPDIIVFNPLISGFCTCGKWEKVHELFSEMLNRGTYPDTVFFTTIMDRLCKNGRVMEAQDMFDLMVHVGVKPNVHTYATLMHGYFFVRKMDEVRKLLGNMLSIGSKPD

SEQ ID NO: 626 - protein, 593 aa, Triticum aestivum
MVSIGEHARPPNSAFLLPNPSSCPGCAGAVGGERRRRPLGPLPLPDSSRSIGGAMSRRAVPAGRRILEQNIKARYRAGAIGTDDALHLFDELLQVAWPSSIAAINCLLIVVGRDCPALVVSLFNHIARAKVAPHNITYVILVDCCSRAGRLDLGFAAMGHIVKTGFAAGSVVSFSHLLRAVCAEKKTSYGMDIVLRIMPELNCIPDVYSYSILFKGLCNEKRSQEALELIHVMVEHGGSCQPNLVSYNTVIDGLLKEGEVGKAYSLFCEMVQSGILANIVTYNSIIFGMCKVHAMDKAEKVLQQMFDREILPDTATYTSLIHGYYSSGQCKEVERVFEHMSINGVQPNMITYNIQMDYLCKSGRCAEARKIFDSMVSLGQKPSVTTYSILLHGYVMEKSFHDMHCLLDLMVENGISPDHHVYNILISAYAKEEMASEVMHIFTKMWQQGLNPSVADYGAVINLLSSIGRMDDAMSQFNQMIAEGLAPDIIVFNPLISGFCTCGKWEKVHELFSEMLNRGTYPDTVFFTTIMDRLCKNGRVMEAQDMFDLMVHVGVKPNVHTYATLMHGYFFVRKMDEVRKLLGNMLSIGSKPD

SEQ ID NO: 627 - protein, 593 aa, Triticum aestivum; identical to SEQ ID NO: 614

SEQ ID NO: 628 - protein, 593 aa, Triticum aestivum
MVSIGEHARPPNSAFLLPNPSSCPGCVGAVGGERHRRPLGPLPLPDSSRSIGGAMSRRAVPAGRRILEQNIKARYRAGAIGTDDALHLFDELLQVAWPSSIAAINCLLIVVGRDCPALAVSLFNHIARAKVAPHNITYGILVDCCSHAGRLDLGFAAMGHIVKTVFATGSIVSFSHLLRAVCAEKKTSYGMDIVLRIMPELNCIPDVYSYSMLFKGLCNEKRSQEALELIHVMVEHGGSCQPNLVSYNAIIDGLLKEGEVGKAYSLFCEMVQSGILANIVTYNSIISGMCKVHAMDKAEKVLQQMFDREILPDTATYTSLIHGCYSSGQCKEVERVFEHMSINGVQPNMITYNIQMDYLCKSGRCTEARKIFDSMVSLGQKPSVTTYSILLHGYVMEKSFHDMHCLLDLMVENGISPDHHVYNILISAYAKEEMASEVMHIFTKMRRQGLNPSVADYGAVINLLSSIGRMDDAMPQFNQMIAEVLAPDIIVFNPLISGFCTCGKWEKVHELFSEMLNRGTYPDTVFFTTIMDRLCKNGRVMEAQDMFDLMVHVGVKPNVHTYATLMHGYFFVRKMDEVRKLLGNMLSIGSKPD

SEQ ID NO: 629 - protein, 593 aa, Triticum aestivum; identical to SEQ ID NO: 606

SEQ ID NO: 630 - protein, 593 aa, Triticum aestivum
MVSIGEHARPPNSAFLLPNPSSCPGCVGAVGGERHRRPLGPLPLPDSSRSIGGAMSRRAVPAGRRILEQNIKARYRAGAIGTDDALHLFDELLQVAWPSSIATINCLLIVVGRDCPALAVSLFNHIARAKVAPHNITYGILVDCCSRAGRLDLGFAAMGHIVKTGFAAGSVISFSHLLRAVCAEKKTSYGMDIVLRIMPELNCIPDVYSYSILFKGLCNEKRSQEALELIHVMVEHGGSCQPNLVSYNTVIDGLLKEGEVGKAYSLFCEMVQSGILANIVTYNSIISGMCKVHAMDKAEKVLQQMFDREILPDTATYTSLIHGYYSSGQCKEVERVFEHMSINGVQPNMITYNIQMDYLCKSGRCAEARKIFDSMVSLGQKPSVTTYSILLHGYVMEKSFHDMHCLLDFMVENGISPDHHVYNILISAYAKEEMASEVMHIFTKMRQQGLNPSVADYGAVINLLSSIGRMDDAMSQFNQMIAEGLAPDIIVFNPLISGFCTCGKWEKVHELFSEMLNRGTYHDTVFFTTIMDRLCKNGRVMESQDMFDLMVHVGVKPNVHTYATLMHGYFFVRKMDEVRKLVGNMLSIGSKPD

SEQ ID NO: 631 - protein, 593 aa, Triticum aestivum; identical to SEQ ID NO: 606

SEQ ID NO: 632 - protein, 593 aa, Triticum aestivum
  SITE 522: note = misc_feature - Xaa can be any naturally occurring amino acid
MVSIGEHARPPNSAFLLPNPSSCPGCVGAVGGERHRRPLGPLPLPDSSRSIGGAMSRRAVPAGRRILEQNIKARYRARAIGTDDALHLFDELLQVAWPSSIAAINCLLIVVGRDCPALAVSLFNHIARAKVAPHNITYGILVDCCSRAGRLDLGFAAMGHIVKTGFAAGSVISFSHLLRAVCAEKKTSYGMDIVLRIMPELNCIPDVYSYSILFKGLCNEKRSQEALELIHVMVEHGGSCQPNLVSYNTVIDGLLKEGEVGKAYSLFCEMVQSGILANIVTYNSIISGMCKVHAMDKAEKVLQQMFDREILPDTATYTSLIHGYYSSGQCKEVERVFEHMSINGVQPNMITYNIQMDYLCKSGRCAEARKIFDSMVSLGQKPSVTTYSILLHGYVMEKSFHDMHCLLDFMVENGISPDHHVYNILISAYAKEEMASEVMHIFTKMRQQGLNPSVADYGAVINLLSSIGRMDDAMSQFNQMIAEGLAPDIIVFNPLISGFCTCGKWEKVHELFSEMLNRGTYXDTVFFTTIMDRLCKNGRVMEAQDMFDLMVHVGVKPNVHTYATLMHGYFFVRKMDEVRKLLGNMLSIGSKPD

SEQ ID NO: 633 - protein, 517 aa, Triticum aestivum
MRPCRTPLLDSTSPLSVLLLDHLHRNRPSPPPSASPPSAFWSPIAAFAAATKRARAGTLSPEDAHHLFDELLRQSNPVPNRFLNSFLAALARAPPSDACGDGPALTVALFNRLCREEAGPCVAPPTIYTYSILMDSCCRVGRPDLGLAVFGRLLKSGFKADQSTASSLLMCLCDVGRTNEAVDVLLHRISELGCEPNVIPYNIVLKSLCDSRRSQQALDLLQMMAQRGCCSPNVVSYNTVIHGLFKEGEVSMACSLFYEMMRQRVMPNVVTYRSMIGALCKVGATDKAKLVLGHMVGNGFRPDKYIWNSFMASLCKQGRSKEAAQLFDYMVAKGHKPDVVTYSTLLHGYATEGCFTDMINLFNSMEGNGIVANSCVFNILIDAYAKRGMMHEAMLIFTEMRERRVSPDIFTYGIIIAALCRMGRLSDAMEKINEMVATGLQPDKAVYYSLIQGFCTHDDLVKAKELVSEMMTKGIPRPNIVFFNSVIASLCKEGRVKDAHGIFDLALNIGERPDLIH

SEQ ID NO: 634 - protein, 517 aa, Triticum aestivum; identical to SEQ ID NO: 633

SEQ ID NO: 635 - protein, 517 aa, Triticum aestivum; identical to SEQ ID NO: 633

SEQ ID NO: 636 - protein, 517 aa, Triticum aestivum; identical to SEQ ID NO: 633

SEQ ID NO: 637 - protein, 517 aa, Triticum aestivum; identical to SEQ ID NO: 633

SEQ ID NO: 638 - protein, 517 aa, Triticum aestivum; identical to SEQ ID NO: 633

SEQ ID NO: 639 - protein, 593 aa, Triticum aestivum
MVSIGEHARPPNSAFLLPNPSSCPGCASAVGGERRRRPLGPLPLPDSSRSIGGSMSRRAVPAGRRILEQNIKARYRAGAIGTDDAHHLFDELLQVAWPSSIATINCLLIVVGRDCPALAISLFNHIARAKVAPHNITYGILVDCCSRAGRLDLGFTAMGHIVKTGFAAGSVVSFSHLLRAVCAEKKTSYGMDIVLRIMPELNCIPDVYSYSTLFKGLCNEKRSQEALELIHVMVEHGGSCQPNLVSYNTVIDGLLKEGEVGKAYSLFCEMVQSGILANIVTYNSIIFDMCKVHAMDKAEKVLQQMFDREILPDTATYTSLIHGYYSSGQCKEVERVFEHMSINGVQPNMITYNIQMDYLCKSGRCAEARKIFDSMVSLGQKPSVTTYSILLHGYVMEKSFHDMHCLLDLMVENGISPDHHVYNILISAYAKEEMASEVMHIFTKMRQQGLNPSVADYGAVINLLSSIGRMDDAMSQFNQMIAEGLAPNIIVFNPLISGFCTCGKWEKVHELFSEMLNRGTYPDTVFFTTIMDRLCKNGRVMEAQDMFDLMVHMGVKPNVHTYATLMHRYFFVRKMDEVRKLLGNMLSIGSKPD

SEQ ID NO: 640 - protein, 436 aa, Triticum aestivum
MGHIVKTGFAAGSVVSFSHLLRAVCAEKKTSYGMDIVLRIMPELNCIPDVYSYNILFKGLCNEKRSQEALELIHVMVEHGGSCQPNLVSYNTVIDGLLKEGEVGKAYSLFCEMVQSGILANIVTYNSIISGMCKVHAMDKAEKVLQQMFDREILPDTATYTSLIHGYYSSGQCKEVERVFEHMSINGVQPNMITYNIQMDYLCKSGRCAEARKIFDSMVSLGQKPSVTTYSILLHGYVMEKSFHDMHCLLDLMVENGISPDHHVYNILISAYAKEEMASEVMHIFTKIRQQGLNPSVADYGAVINLLSSIGRMDDAMSQFNQMIAEGLAPDIIVFNPLISGFCTCGKWEKVHELFSEMLNRGTYPDTVFFTTIMDRLCKNGRVMEAQDMFDLMVHVGVKPNVHTYATLMHGYFFVRKMDEVRKLLGNMLSIGSKPD

SEQ ID NO: 641 - protein, 590 aa, Triticum aestivum
  SITE 585: note = misc_feature - Xaa can be any naturally occurring amino acid
MVSIGEHARPPNSTFLLPNPSSCPGCAGAVGGERHRRPLGPLPLPDSSRSIGGAMSRRAVPAGRRILEQNIKARYRAGAIGTDDALHLFDELLQVAWPSSIAAINCLLIVVGRDCPALAVSLFNHIARAKVAPHNITYGILVDCCSRAGRLDLGFAAMGHIVKTGFAAGSVVSFSHLLRAVCAEKKTSYGMDIVLRIMPELNCIPDVYSYSILFKGLCNEKRSQEALELIHVMVEHGGSCQPNLVSYNTVIDGLLKEGEVGKAYSLFCEMVQSGILANIVTYNSIISGMCKVHAMDKAEKVLQQMFDREILPDTATYTSLIHGYYSSGQCKEVERVFEHMSINGVQPNMITYNIQMDYLCKSGRCAEARKIFDSMVSLGQKPFVTTYSILLHGYVMEKSFHDMHCLLDLMVENGISPDHHVYNILISAYAKEEMASEVMHIFTKMRQQGLNPSVADYGAVINLLSSIGRMDDAMSQFNQMIAEGLAPDIIVFNPLISGFCTCGKWEKVHELFSEMLNRGTYPDTVFFTTIMDRLCKNGRVMEAQDMFDLMVHVGVKPNVHTYATLMHGYFFVRKMDEVRKLLGNXSKQRF

SEQ ID NO: 642 - protein, 436 aa, Triticum aestivum
  SITE 430: note = misc_feature - Xaa can be any naturally occurring amino acid
MGHIVKTGFAAGSVVSFSHLLRAVCAEKKTSYGMDIVLRIMPELNCIPDVYSYSILFKGLCNEKRSQEALELIHVMVEHGGSCQPNLVSYNTVIDGLLKEGEVGKAYSLFCEMVQSGILANIVTYNSIISGMCKVHAMDKAEKVLQQMFDREILPDTATYTSLIHGYYSSGQCKEVERVFEHMSINGVQPNMITYNIQMDYLCKSGRCAEARKIFDSMVSLGQKPFVTTYSILLHGYVMEKSFHDMHCLLDLMVENGISPDHHVYNILISAYAKEEMASEVMHIFTKMRQQGLNPSVADYGAVINLLSSIGRMDDAMSQFNQMIAEGLAPDIIVFNPLISGFCTCGKWEKVHELFSEMLNRGTYPDTVFFTTIMDRLCKNGRVMEAQDMFDLMVHVGVKPNVHTYATLMHGYFFVRKMDEVRKLLGNMLXIGSKPD

SEQ ID NO: 643 - protein, 436 aa, Triticum aestivum; identical to SEQ ID NO: 640

SEQ ID NO: 644 - protein, 436 aa, Triticum aestivum; identical to SEQ ID NO: 640

SEQ ID NO: 645 - protein, 567 aa, Triticum aestivum
MSRRLVPVDRRILEQNIKARYHAGDIGTQDALHLFDELLQCAGSSSIRAINYLVTTVGRDCPALGVSLFNRVASANVAPNSITYTILVDCCCRAGRLDLGFAAMGHIIKMGFAADAIVTFSHLLNAICAEKKTSYAMDIVLRIMPMFNCVPNIFSYSILFKGLCNEKRSQEALELIQVMVEHGGSCQPNVVSYSTVIDGLLKEGLVGKAYSLFCEMLQRGISPNAVTCSSIISGMCKAQSMDKSEEVLQQMLDRRILPDVTTYNSLIHGYYSSGRCKEVDRIFQEMSRNGVQPNIVTYNIQMDYLCKSGRCAEARKIFDSMIGLGQKPDVTTYSILLHGSAMEKSFHEMHCLIDLMVGNGISPDHHVYNILMSAYAKEETVGEVMHIFTKMRQQGLNPNVANYGAAVNLLSKIGRMDDAMSQFNQMITEGLAPDIIVFTPLISGFCSCGKWEKVDELFSEMLDRGICPNTVFFNTIMDRLCKNERVMEAQDLFDLMVHMGVKPDVCTYSTLIGGYLFVGKMDEVSKLLDNMVSIGMEPDVITYNILMHLIYLIYIHLVCYVPWTYLI

SEQ ID NO: 646 - protein, 567 aa, Triticum aestivum
MSRRLVPVDRRILEQNIKARYHAGDIGTQDALHLFDELLQCAGSSSIRAINYLVTTVGRDCPALGVSLFNRVASANVAPNSITYTILVDCCCRAGRLDLGFAAMGHIIKMGFAADAIVTFSHLLNAICAEKKTSYAMDIVLRIMPMFNCVPNIFSYSILFKGLCNEKRSQEALELIQVMVEHGGSCQPNVVSYSTVIDGLLKEGLVGKAYSLFCEMLQRGISPNAVTCSSIISGMCKAQSMDKSEEVLQQMLDRRILPDVTTYNSLIHGYYSSGRCKEVDRIFQEMSRNGVQPNIVTYNIQMDYLCKSGRCAEARKIFDSMIGLGQKPDVTTYSILLHGSAMEKSFHEMHCLIDLMVGNGISPDHHVYNILISAYAKEETVGEVMHIFTKMRQQGLNPNVANYGAAVNLLSKIGRMDDAMSQFNQMITEGLAPDIIVFTPLISGFCSCGKWEKVDELFSEMLDRGICPNTVFFNTIMDRLCKNERVMEAQDLFDLMVHMGVKPDVCTYSTLIGGYLFVGKMDEVSKLLDNMVSIGMEPDVITYNILMHLIYLIYIHLVCYVPWTYLI

SEQ ID NO: 647 - protein, 567 aa, Triticum aestivum; identical to SEQ ID NO: 646

SEQ ID NO: 648 - protein, 567 aa, Triticum aestivum; identical to SEQ ID NO: 646

SEQ ID NO: 649 - protein, 567 aa, Triticum aestivum; identical to SEQ ID NO: 645

SEQ ID NO: 650 - protein, 567 aa, Triticum aestivum; identical to SEQ ID NO: 645

SEQ ID NO: 651 - protein, 593 aa, Triticum aestivum
MSGLRLRPRRSSSSTFPMPRSRLRHYASAMPMSSLRPLHRSSSSTTSPARAWSPHAAFAAATERVRAGALRPEDAHTLFDELLRQATPVPERSLNGFLAALARAPASGNCIRDGPALAVVLFNRVCREEAGPQVAALTGCTYSILMDCYCRARRPDLGLALFGRFLREGLKTHQIVANTFLKCLCYAKLTDEAVDVLLHRMSEFGCVPDAISYNTVLKSLCDNGMSQRGLELLQMIAKEVGVCSLNLVAYNTVIYGFFKEGETGKACNLFHEMMQQGVEPDVVTYNLIIDALCKARAMDKAEVVLQQMISKGAQPDTVTYNCMINGYATSGRLKKSAKMFREMKSRGLMPDIVTCNSFLSSLCKHGRSKEAREIFDSMTAKGHKPDIVSYRILLHGYASEGCFADMIDLFNSMKSNGIAADCRVFTILIGAYAKHGMMDDAMLIFTEMQQQGLSPNVVTYSTVISALSRMGRLANAMEKFNQMISMGVQPNKAVYHTLIQGSCMHGDLIKAKELVSEMMNKGIPHPSITFFGSIINSLCKDGRVMDAHDIFDLVIDIGERPSAITFNSLVDGYCLVGKMDKAFGMLNAMESLV

SEQ ID NO: 652 - protein, 593 aa, Triticum aestivum; identical to SEQ ID NO: 651

SEQ ID NO: 653 - protein, 593 aa, Triticum aestivum
MSGLRLRPRRSSSSTFPMPRSRLRHYASAMPMSSLRPLHRSSSSTTSPACAWSPHAAFAAATERVRAGALRPEDAHTLFDELLRQATPVPERSLNGFLAALARAPASGNCIRDGPALAVVLFNRVCREEAGPQVAALTGCTYSILMDCYCRARRPDLGLALFGRFLREGLKTHQIVANTFLKCLCYAKLTDEAVDVLLHRMSELGCVPDAISYNTVLKSLCDNGMSQRGLELLQMIAKEVGVCSLNLVAYNTVIYGFFKEGETGKACNLFHEMMQQGVEPDVVTYNLIIDALCKARAMDKAEVVLQQMISKGAQPHTVTYNCMINGYATSGRLKKSAKMFREMKSRGLMPDIVTCNSFLSSLCKHGRSKEAREIFDSMTAKGHKPDIVSYRILLHGYASEGCFADMIDLFNSMKSNGIAADCRVFTILIGAYAKHGMMDDAMLIFTEMQQQGLSPNVVTYSTVISALSRMGRLANAMEKFNQMISMGVQPNKAVYHTLIQGSCMHGDLIKAKELVSEMMNKGIPRPSITFFGSIINSLCKDGRVMDAHDIFDLVIDIGERPSAITFNSLVDGYCLVGKMDKAFGMLNAMESLV

SEQ ID NO: 654 - protein, 593 aa, Triticum aestivum; identical to SEQ ID NO: 651

SEQ ID NO: 655 - protein, 593 aa, Triticum aestivum; identical to SEQ ID NO: 653

SEQ ID NO: 656 - protein, 593 aa, Triticum aestivum; identical to SEQ ID NO: 651

SEQ ID NO: 657 - protein, 529 aa, Triticum aestivum
MVSIGEHARPPNSAFLLPNPSSCPGCAGAVGGERRRRPLGPLPLPDSSRSIGGAMSRRAVPAGRRILEQNIKARYRAGAIGTDDALHLFDELLQVAWPSSIAAINCLLIVVGRDCPALVVSLFNHIARAKVAPHNITYVILVDCCSRAGRLDLGFAAMGHIVKTGFAAGSVVSFSHLLRAVCAEKKTSYGMDIVLRIMPELNCIPDVYSYSILFKGLCNEKRSQEALELIHVMVEHGGSCQPNLVSYNTVIDGLLKEGEVGKAYSLFCEMVQSGILANIVTYNSIIFGMCKVHAMDKAEKVLQQMFDREILPDTATYTSLIHGYYSSGQCKEVERVFEHMSINGVQPNMITYNIQMDYLCKSGRCAEARKIFDSMVSLGQKPSVTTYSILLHGYVMEKSFHDMHCLLDLMVENGISPDHHVYNILISAYAKEEMASEVMHIFTKMRQQGLNPSVADYGAVINLLSSIGRMDDAMSQFNQMIAEGLAPDIIVFNPLISGFCTCGKWEKVHELFSEMLNRTSTGIRSSRQR

SEQ ID NO: 658 - protein, 490 aa, Triticum aestivum
MVSIGEHARPPNSAFILPNPSSCPGCAGAVGGERRRRPLGPLPLPDSSRSIGGAMSRRAVPAGRRILEQNIKARYRAGAIGTDDALHLFDELLQVAWPSSIAAINCLLIVVGRDCPAPAVSLFNHIARAKVAPHNITYGILVDCCSRAGRLDLGFAAMGHIVKTGFAAGSVVSFSHLLRAVYAKKKTSYGMDIVLRIMPELNCIPDVYSYSILFKGLCNEKRSQEALELIHVMVEHGGSCQPNLVSYNTVIDGLLKEGEVGKAYSLFCEMVQSGILANIVTYNSIIFGMCKVHAMDKAEKVLQQMFDREILPDTATYTSLIHGYYSSGQCKEVERVFEHMSINGVQPNMITYNIQMDYLCKSGRCAEARKIFDSMVSLGQKPSVTTYSILLHGYVMEKSFHDMHCLLDLMVENGISPDHHVYNILISAYAKEEMASEVMHIFTKMRQQGLNPSVAYIRHTQLVCLTGSAMSTHGPPRCSSCGLSITLRCF

SEQ ID NO: 659 - protein, 585 aa, Triticum aestivum
  SITE 464: note = misc_feature - Xaa can be any naturally occurring amino acid
MVSIGEHARPPNSTFLLPNPSSCPGCAGAVGGERHRRPLGPLPLPDSSRSIGGAMSRRAVPAGRRILEQNIKARYRAGAIGTDDALHLFDELLQVAWPSSIAAINCLLIVVGRDCPTLAVSLFNHIARAKVAPHNITYGILVDCCSRAGRLDLGFAAMGHIVKTGFAAGSVVSFSHLLRAVCAEKKTSYGMDIVLRIMPELNCIPDVYSYSILFKGLCNEKRSQEALELIHVMVEHGGSCQPNLVSYNTVIDGLLKEGEVGKAYSLFCEMVQSGILANIVTYNSIISGMCKVHAMDKAEKVLQQMFDREILPDTATYTSLIHGYYSSGQCKEVERVFEHMSINGVQPNMITYNIQMDYLCKSGRCAEARKIFDSMVSLGQKPFVTTYSILLHGYVMEKSFHDMHCLLDLMVENGISPDHHVYNILISAYAKEEMASEVMHIFTKMRQQGLNPSVADYGAVINLXSSIGRMDDAMPQFNQMIAEGLAPDIIVFNPLIRRSNHHFTLLSQLPLYPTLASPSSCSSFLQENPDLLLPLFFSPKEGKVSASMVLILAKARSCNPETDPITPSLFFFWVCDYGFFSFISI

SEQ ID NO: 660 - protein, 551 aa, Triticum aestivum
MVSIGEHARPPNSAFILPNPSSCPGCAGAVGGERRRRPLGPLPLPDSSRSIGGAMSRRAVPAGRRILEQNIKARYRAGAIGTDDALHLFDELLQVAWPSSIAAINCLLIVVGRDCPAPAVSLFNHIARAKVAPHNITYGILVDCCSRAGRLDLGFAAMGHIVKTGFAAGSVVSFSHLLRAVYAKKKTSYGMDIVLRIMPELNCIPDVYSYSILFKGLCNEKRSQEALELIHVMVEHGGSCQPNLVSYNTVIDGLLKEGEVGKAYSLFCEMVQSGILANIVTYNSIIFGMCKVHAMDKAEKVLQQMFDREILPDTATYTSLIHGYYSSGQCKEVERVFEHMSINGVQPNMITYNIQMDYLCKSGRCAEARKIFDSMVSLGQKPSVTTYSILLHGYVMEKSFHDMHCLLDLMVENGISPDHHVYNILISAYAKEEMASEVMHIFTKMRQQGLNPSVADYGAVINLLSSIGRMDDAMSQFNQMIAEGLAPNIIVFNPLISGFCTCGKWEKVHELFSEMLNRGTYPDTVFFTTIMDRLCKNGRVMEAQDMFGLMI

SEQ ID NO: 661 - protein, 580 aa, Triticum aestivum
MAHPPSKSNPSRAELQIESEIPQSHTSVRRPPSAGRARGWSSPARDRTHHRLRKKRARPLCPVSPPSVLLPPGLQVVAASIHRCCRKTATMSRLQVRSFSSPVSSRANDLLTELHGHLGFGTLRPELAHQLFDEMLRQPVLVSARALSGLFAALARAPPSPACTDGSALAIDLFNCMARAGRRQATVPTIYTYSILIECCHRTCRPDLGLAFFGRLLKTGIPTDIITYSNLFKCLCDMKRTEEALNVLLHRMPDDLPNVISYSVILKSFCDNGRSQLALDLLQMMAKKGANHSPDVMSYNMVIDGFFKEGESSKACDLFHELMQQGVVPDVVMCTSIINALCKARAMDKAEVVLRSMVHNGVQPDVVTYNSLIQGYSTLGQLKELARLLKVMRSQGVMPCVATYNSLMTCLCKNGRFKEAVEIFYSMAVKGQKPDVASYSIILHGYAKEGSLVDMIDLCQLMAANGVIPDLHCFNILIATYAEYGMTDVAMLFFEEMLKQGVHPNEVTYLSVIAGLCKTGRMDDATEKLGEMIDRGVPPDKTVYMCMMEGYFKHGDSLKAKEFITKMKNKDIPHRSQKGN

SEQ ID NO: 662 - protein, 304 aa, Triticum aestivum
MQRRKGYECTSIFDLVIGMGERPNVITFSSLIDGYGLVGQMGKALGVLDAMVSAGIEPNVVTYSSLLDGYCKNGRINDALILFREMPHKRIKPNTVTYGVMLDGLFRAGRTVAAREMFHEMTERGIPVSISIYNIILGGLCRNNCADEAIALFQKLGARNVKFDIITLNTMINAMFKVRRREEANDLFAAISASGLVPDASTYGIMIENILKEGSVEEVDNMFSSMEKSGCAPSSRLINYVIRMLLEKGEIARAGNYLSKVDGKIISLEASTTSLLLSLFSREGKYRENIELLPAKYQFFNGFG

SEQ ID NO: 663 - protein, 304 aa, Triticum aestivum; identical to SEQ ID NO: 662

SEQ ID NO: 664 - protein, 569 aa, Triticum aestivum
MMHQGVEPSVWTYSSIIDALCKARAMDKAELVLQQMVNKGVQPNNVTYNCMIHGYSTSGRWKEAAKLFREMKSRGLIPDTFTCNALMTYLCKHGRSKEAAEFFDAMTAKGHRNVNSYCILLHGYANEGCFADMIDLFNSMESNGFVADCHVFTILIDAYAKRGMMDEAMLIFTEMREKGVSPNVVTYSTVIAALCRLGRLSDAMDRFNEMTDMGVQPNTAVYRSLIQGFCMLGDLVKVKEFVSEMMNKGIPRPDIAFFTSVINSLCKEGRVMNAQGIFDLVIGMGERPNVIIFSSLIDGYGLVGQMGKALGVLDAMVSAGIEPNVVTYSSLLDGYCRNGRINDALILFREMPHKRIKPDTVTYGIMLDGLFRAGRTVAAREMFHEMTERGIPVSISIYNIILRGLCRNNCADEAIALFQKLGARNVKFDIITLNTMINAMFKVRRREEANDLFSAISASGLVPNASTYGIMIENILKEGSVEEVDNMFSSMEKSGCAPSSRLINYVIRMLLEKGEIARAGNYLSKVDGKIISLEASTTSLLLSLFSREGKYRENIELLPAKYQFFNGFG

SEQ ID NO: 665 - protein, 569 aa, Triticum aestivum; identical to SEQ ID NO: 664

SEQ ID NO: 666 - protein, 304 aa, Triticum aestivum; identical to SEQ ID NO: 662

SEQ ID NO: 667 - protein, 304 aa, Triticum aestivum; identical to SEQ ID NO: 662

SEQ ID NO: 668 - protein, 569 aa, Triticum aestivum; identical to SEQ ID NO: 664

SEQ ID NO: 669 - protein, 446 aa, Triticum aestivum
MLRQPVPVSARALGGLFSALARAPPSTACTDGPALAIDLFNCMTRVSRRRVIAPDIYTYNILIDCCHKACRPDLGPAFFGCLLKTGITMSVITYSSLFKCLCDMKRTDEALDVLLHRMPEDLPDIISYSVILKSFCDNGRSQCALDLLRMMAKKGTDHSPNVVSYNLVIDGFFKEGEGSKACDLFHEMIQQGPVPDVVTYTSVIVALCKARAMDKAEVVLRQMVHDGVQPNTVTYNSLIQGYSTLGQLKEVARLLKVMRSQGVLPSAVTCSSVMDYLCKHGRIKEAEEIFYSMAVNGRKPDIVSYSIMLLGYAMEGSLVKMIDLCELMARDGVVPDLRCFNILINAYAKYGRMDVAMLFFEDMLKQGVKPNEFTYLTVISVFCKMGRMDDAMEKFSEMIDMGVPPDTKVYMCMVEGYLNLGDSMKAKEFITKMKNMDIHHRPRKGN

SEQ ID NO: 670 - protein, 417 aa, Triticum aestivum
MRCCCRARRPGLGLAFFGRLLRTGLRTDGVDAYALIKCFCLAKRTDEAVSVRLHRLPELGRVPDALSYSVVLKVLCDDGRSQRALGLLQMMWKEGGGCAPNVVAYSTVIHGFCKEGKVSKACELFNEMVQQGVKPNVVTYTQVIDALCKARAMDKAESFLRHMVDNDVRPNNVTYKCIIQGYSSLGWWEEAVKIFRETTSRGLILDDVTRNSFVSSLCNHGRSKEAAEIAHQIIENGTTVSISTYGIILGELCRNDCTEEAIVLFHKLGAVDVKFDITIFNTMIDAMYRVRRREEANILFAAISANGLVPNASTYRIMITNLLKEGSMEEADHMFSSMETSGYAPSSVLLNDIIRMLLEKGEIVKAGNYLSKVDGKSISLEASTGLLMRHLFSTEGKYHEQIKSLPERYQYFGVRHS

SEQ ID NO: 671 - protein, 417 aa, Triticum aestivum; identical to SEQ ID NO: 670

SEQ ID NO: 672 - protein, 417 aa, Triticum aestivum; identical to SEQ ID NO: 670

SEQ ID NO: 673 - protein, 417 aa, Triticum aestivum; identical to SEQ ID NO: 670

SEQ ID NO: 674 - protein, 417 aa, Triticum aestivum; identical to SEQ ID NO: 670

SEQ ID NO: 675 - protein, 417 aa, Triticum aestivum; identical to SEQ ID NO: 670

SEQ ID NO: 676 - protein, 391 aa, Triticum aestivum
MPGFSSAASMSPLRLRLRLHARHSSASQPSRRQGWDPHAAFAAATECARSGNLTPEDAHNLFDELLRQGNPVLGRPLNNLLAALARAPASSACRDGPALVVALFSRISQGARLRVLHPTACTYGILMDCSCRAHRLDLAFAFFGRLLRTGLKAGVIEVNSLLKGLCHAKRADEAMEVLLHRMPELFIGVQGTAVYRSLIQGFCTHGDLVKAKEYVTEMMKKGMPPPDIMFFSSIMQNLCTEGRVIEARDILDLIVRIGMRPDVFIFNILIGGYCLVGKMEDASKIFDDMVSYGLEPCNFTYGILINGYCKNKRIDDGLILFKEMLRKGLKPTTFNYNVILDGLFLAGQTVAAKEKFDEMVESGVSVCIDTYSIVLGGLCRNSCSSEAITLF

SEQ ID NO: 677 - protein, 391 aa, Triticum aestivum; identical to SEQ ID NO: 676

SEQ ID NO: 678 - protein, 484 aa, Triticum aestivum
MSRLQVRSFSNSVSSHANELLDKLQGHLHSRTLRPDLVHQLFDEMLRQPVPVSVRALNGLFAALARAPSSTICTDAPALAIDLFNRMARAGRRQVPAPTIHTYSMLIECCQRACRPDLGLAFFGRLLKTGIKTNAITYSSLLKCLCDMKRTEEALGVLLHRMPDDLPNAISYSVILKSFCDSGRSQLVLDLLRMMAEKGSDHSPSVVSYSLVIDGFFKEGEISKACNLLHEMMQQGVVPDVVTYNSFIDALCKARAMEKAEVVLRSMVHNGVQPNAVTYSSLIQGYSTLGQLKEVARLLKAMRSQGSMPDVVICSSVMDYLCKHGRIKDAEEIFYSMAVNGRKPDIVSYTIMLHGYAIEGSLVKMIDLCELMARDGVVPDLRCAYAKYGMMDVAMLFLEDMLKQGVKPNEFTYLTVISAFCKMGRMDDAMEKFSEMIDMGVPVDTEVYMCMVEGYFNHGDSMKAEKFITKMKNRDIHHKLRKGN

SEQ ID NO: 679 - protein, 490 aa, Triticum aestivum
MSRLQVRSFSNSVSSHANELLDKLQGHLHSRTLRPDLVHQLFDEMLRQPVPVSVRALNGLFAALARAPSSTICTDAPALAIDLFNRMARAGRRQVPAPTIHTYSMLIECCQRACRPDLGLAFFGRLLKTGIKTNAITYSSLLKCLCDMKRTEEALGVLLHRMPDDLPNAISYSVILKSFCDSGRSQLVLDLLRMMAEKGSDHSPSVVSYSLVIDGFFKEGEISKACNLLHEMMQQGVVPDVVTYNSFIDALCKARAMEKAEVVLRSMVHNGVQPNAVTYSSLIQGYSTLGQLKEVARLLKAMRSQGSMPDVVICSSVMDYLCKHGRIKDAEEIFYSMAVNGRKPDIVSYTIMLHGYAIEGSLVKMIDLCELMARDGVVPDLRCFNILINAYAKYGMMDVAMLFLEDMLKQGVKPNEFTYLTVISAFCKMGRMDDAMEKFSEMIDMGVPVDTEVYMCMVEGYFNHGDSMKAEKFITKMKNRDIHHKLRKGN

SEQ ID NO: 680 - protein, 490 aa, Triticum aestivum
MSRLQVRSFSNSVSSHANELLDKLQGHLHSRTLRPDLVHQLFDEMLRQPVPVSVRALNGLFAALARAPSSTICTDAPALAIDLFNRMARAGRRQVPAPTIHTYSILIECCQRACRPDLGLAFFGRLLKTGIKTNAITYSSLLKCLCDMKRTEEALGVLLHRMPDDLPNAISYSVILKSFCDSGRSQLVLDLLRMMAEKGSDHSPSVVSYSLVIDGFFKEGEISKACNLLHEMMQQGVVPDVVTYNSFIDALCKARAMEKAEVVLRSMVHNGVQPNAVTYSSLIQGYSTLGQLKEVARLLKAMRSQGSMPDVVICSSVMDYLCKHGRIKDAEEIFYSMAVNGRKPDIVSYTIMLHGYAIEGSLVKMIDLCELMARDGVVPDLRCFNILINAYAKYGMMDVAMLFLEDMLKQGVKPNEFTYLTVISAFCKMGRMDDAMEKFSEMIDMGVPVDTEVYMCMVEGYFNHGDSMKAEKFITKMKNRDIHHKLRKGN

SEQ ID NO: 681 - protein, 490 aa, Triticum aestivum; identical to SEQ ID NO: 679

SEQ ID NO: 682 - protein, 490 aa, Triticum aestivum; identical to SEQ ID NO: 679

SEQ ID NO: 683 - protein, 490 aa, Triticum aestivum; identical to SEQ ID NO: 679

SEQ ID NO: 684 - protein, 542 aa, Triticum aestivum
MPRLSSTTPMSPPRLRLRLRGRHSSSTSHPSRIWDPHAAFAGATQRAHSGNLTPEDAHHLFDELLRQGNPVQERPLTNFLAALARAPASASCSDGPALAVALFGRLSRGAGRRVAQPNVFTYGVLMDCCCRACRPDLALAFFGRLFRKGLEANRVIFCTLLKGLCHAKRTDEALDVLLHRMPELGCTPNVVAYTTVIHGFFKEGQVGKACNLFHGMAQQGVAPNLVTYNSVIDALCKAKAMDKAEYFLGQMVDDGVVPDNVTYNSLIHGYSSSGHWKEAVRVFKEMTSRRVTADVHTYNMFMTFLCKHGRSKEAAGIFDTMAIKGLKPDNVSYAILLHGYATEGCLVDMINLFNSMERDCILPDCRIFNILINAYAKSGKLDKAMLIFNEMQKQGVSPNAVTYSTVIHTFCKKGRLDDAVIKFNQMIDTGVRQGTAVYGSLIQGFCTHGDLVKAKELLTEMMNKGMLPPDIKFFHSIMQNLCTEGRVIEARDVLGLIAHIGMRPDVCTFNILIGGYCLVGKMEDASKIFDDMMSYGLEPSNC

SEQ ID NO: 685 - protein, 542 aa, Triticum aestivum; identical to SEQ ID NO: 684

SEQ ID NO: 686 - protein, 537 aa, Triticum aestivum
MVEHGGSCQPNVVTYSTVIDGLLTEGEVNKAYSLFCEMLQRGISPNVVTCSSIISGMCKLHAMDKAEEVLQQMFERRILPDVATYTSLIHGYYSLGQCKEVDWILWEMSRNGVQPDIVTYNIQMDYLCKSGRCAKARKIFDSMVGLGQKPDVTTYNVLLHGYAMERSFHDMNCLIELMDDNGISPDHYGYNILISAYAKEKMVDEVMHIFTKMRQQGLNPDVVNYGAAVNLLSKIGRMDDAMSQFNQMITEGLAPDIIVFTPLISGFCSCGKWEKVDELFSEMLDRGICPNTVFFNTIMDRLCKNERVMEAQDLFDLMVHMGVKPDVCTYNTLIGGYLFVGKMDEVSKLLDNMVSIGMEPDVITYNILIDGYSKNGKIDDALVVFRGMLERKDKPSVITFNIMIGALLKCHRKEEAKDLFDGIWAKGLVPDVVTYSLMIQKLIEEGSLQESDDLFLSMEKNGCAADSRMLNAIVRSLLQKGDVPRAGTYLSKINERSFTLEGSTATLLTALASGGRGQEYKELLPEKYHSFLEQGID

SEQ ID NO: 687 - protein, 537 aa, Triticum aestivum; identical to SEQ ID NO: 686

SEQ ID NO: 688 - protein, 537 aa, Triticum aestivum; identical to SEQ ID NO: 686

SEQ ID NO: 689 - protein, 537 aa, Triticum aestivum; identical to SEQ ID NO: 686

SEQ ID NO: 690 - protein, 537 aa, Triticum aestivum; identical to SEQ ID NO: 686

SEQ ID NO: 691 - protein, 537 aa, Triticum aestivum; identical to SEQ ID NO: 686

SEQ ID NO: 692 - protein, 221 aa, Triticum aestivum
MIAVSLFNRLCREASPHASPLTVHTYGILTDCCCRARRPDLGLAFFGRLLRTGLRTDGVDAYALIKCFCLAKRTDEAVSVLLHRLPELGCAPDALSYSVVLKVLCDDGRSQRAFDLLQMMSKEGGGCAPNVVAYSTVIHGFCKEGKVSKACDLFDEMVQQGVKPNVVTYTSIIDALCKARAMDKAESFLRHMVDNDVRPAILSTLLDYIGLYFPPLYYFWD

SEQ ID NO: 693 - protein, 543 aa, Triticum aestivum
MAVMPRLHSTTPMPRLLRRLSSTSTSTSAPSRCWDPSAALAAATERVRAGTLRPADAHQLFDELLQQATPVPGPALNGFLAALARAPASAACTDSPALAVSLFNRLCREASPHASPLTVHTYGILTDCCCRARRPDLGLAFFGRLLRTGLRTDGVDAYALIKCFCLAKRTDEAVSVLLHRLPELGCAPDALSYSVVLKVLCDDGRSQRAFDLLQMMSKEGGGCAPNVVAYSTVIHGFCKEGKVSKACDLFDEMVQQGVKPNVVTYTSIIDALCKARAMDKAESFLRHMVDNDVRPNNVTYKYMIQGYSSLGWWEEAVKIFRETTSRGLILDDVTRNSFVASLCNHGRSKEAAEIARQMIETGTTVSISTYGIILGELCRNNCTEEAIVLFHKLGAVNVKFDITIFNTMIDAMYRVRRREEANILFAAISANGLVPNASTYRIMITNLLKEGSMEEADHMFSSMETSGYAPSSVLLNDIIRMLLEKGEIVKAGNYLSKVDGKSISLEDSTGLSMVHLFSREGKYHEQIKSLPAIYRFFGGVRHS

SEQ ID NO: 694 - protein, 544 aa, Triticum aestivum
MAVMPRFHSTTPTPRLLRRLSSTSASTSAPPRCWDPSAALTAATERVRAGTLSPADAHHLFDELLQRPTPVPGPALNGFLAALARAPASAACRDSPSLAVSIFNRLCREASPHGHASPLTAHTYGILMRCCCRARRPGLGLAFFGRLLRTGLRTDGVDAYALIKCFCLAKRTDEAVSVLLHRLPELGRVPDALSYSVVLKVLCDDGRSQRALGLLQMMWKEGGGCAPNVVAYSTVIHGFCKEGKVSKACELFNEMVQQGVKPNVVTYTSVIDALCKARAMDKAESFLRHMVDNDVRPNNVTYKCIIQGYSSLGWWEEAVKIFRETTSQGLILDDVTRNSFVSSLCNHGRSKEAAEIAHQIIENGTTVSISTYGIILGELCRNDCTEEAIVLFHKLGAVDVKFDITIFNTMIDAMYRVRRREEANILFAAISANGLVPNASTYRIMITNLLKEGSMEEADHMFSSMETSGYAPSSVLLNDIIRMLLEKGEIVKAGNYLSKVDGKSISLEASTGLLMRHLFSTEGKYHEQIKSLPERYQFFGVRHG

SEQ ID NO: 695 - protein, 293 aa, Triticum aestivum
MFDFILGIGRRPDVIMYNSLMDGYCLVGKVEEALRVLDAMKSAGLQPTAVTYAILLNGYCKIGRIADGLSLFREMSLSGVKPTTFMYNIIFDGLFRSGRAVSAKEKFRTMTESGIPVGVDTYYIVLHGLCKNNCTGEAIELFKKLRAMNVKIDVITLNTMISVMFKTRRIEEAKDLFATISAIGLVPSVVTYSVMMTNFIEEGLLAEADDMFLAMEKAGCAPDSRLLNHVVRVLLENGAVVKAATYLAKLDAKQLSVEASTVSLILSLFSRKGKLREHVKLLPVKYQPPEMLD

SEQ ID NO: 696 - protein, 534 aa, Triticum aestivum
MVDQGIEPNIKTYNCLIHGYSTFGQWKEALRVFKEMASLGVVPDVVTLTSLIDSLCKHRRTKEAREIFDSMAAKGLKPNIVSYSTMLNGYVKEGSFEDMTDLFNSMVRNGVVPNHHIFNILINAYAKRGLMDEAMHMFEVMRQQGVNPDVVDYLVIMDSLCKMGRMDAALDKFNQMVNQGVSPNKAVYQCLVLGSCSHGHFVKAKDLISEAINRGLFSNSVFFYPVINDLCKEGKVNEAQDMFDFILGIGRRPDVIMYNSLMDGYCLVGKVEEALRVLDAMKSAGLQPTAVTYAILLNGYCKIGRITDGLSLFREMSLSGVKPTTFMYNIIFDGLFCSGRAVSAKEKFRTMTESGIPVGVDTYNIVLHGLCKNNCTGEAIELFKKLRAMNVKIDVITLNTMISVMFKTRRIEEAKDLFATISAIGLVPSIVTYSVMMTNFIEEGLLAEADDMFLAMEKAGCAPDSRLLNHVVRVLLENGAVVKAATYLAKLDAKQLSVEASTVSLILSLFSRKGKLREHVKLLPVKYQPPEMLD

SEQ ID NO: 697 - protein, 534 aa, Triticum aestivum; identical to SEQ ID NO: 696

SEQ ID NO: 698 - protein, 293 aa, Triticum aestivum; identical to SEQ ID NO: 695

SEQ ID NO: 699 - protein, 208 aa, Triticum aestivum
MYNIIFDGLFRSGRAVSAKEKFRTMTESGIPVGVDTYNIVLHGLCKNNCTGEAIELFKKLRAMNVKIDVITLNTMISVMFKTRRIEEAKDLFATISAIRLVPSVVTYSVMMTNFIEEGLLAEADDMFLAMEKAGCAPDSRLLNHVVRVLLENGAVVKAATYLAKLDAKQLSVEASTVSLILSLFSRKGKLREHVKLLPVKYQPPEMLD

SEQ ID NO: 700 - protein, 384 aa, Triticum aestivum
MSRRFVPVDRRILERNIKARYHAGDIGTEDALNLFDELIQVAGPSSVLAINCLLTVVGRDCPALGVSLFNRVARAKVPPHNITYSILVDCCCRAGRLDLGHAAMGHVIKLGFAAEAIVNFSHLLKAICAEKKTSYAMDIVLRIMPEFNCIPNIFSYNILFKGLCNEKRSQEAPELIHIMAEDGGSCQPNVVSYNTVIDGLLKEGEVGQAYSLFCVMLQRGISPNVVTCTSIISGMCKVHAMDKAEEVLQQMTDRRILPDVATYNSLIHGYYSLGQCKEVDRIFKEMTRNGVQPNVVTYNIQMDYLCKSGRCAEARKIFDSMISLGQKPTVTTYNILLHGYAMERSFHDMNCIIELMDDNGISPDHYCYNILISAYKKKRATWCM

SEQ ID NO: 701 - protein, 545 aa, Triticum aestivum
MSRRFVPVDRRILERNIKARYHAGDIGTEDALNLFDELIQVAGPSSVLAINCLLTVVGRDCPALGVSLFNRVARAKVPPHNITYSILVDCCCRAGRLDLGHAAMGHVIKLGFAAEAIVNFSHLLKAICAEKKTNYAMDIVLRIMPEFNCIPNIFSYNILFKGLCNEKRSQEALELIHIMAEDGGSCQPNVVSYNTVIDGLLKEGEVGQAYSLFCVMLQRGISPNVVTCTSIISGMCKVHAMDKAEEVLQQMTDRRILPDVATYNSLIHGYYSLGQCKEVDRIFKEMTRNGVQPNVVTYNIQMDYLCKSGRCAEARKIFDSMISLGQKPTVTTYNILLHGYAMERSFHDMNCIIELMDDNGISPDHYCYNILTSAYAKEKMVDEVMHISTKMRQQGLNPDVENYGAVVNLLSKIGRMDDAMSQFNQMITEGLAPDIIVFTPLISGFCSCGKWEKVDELFSEMLDRGICPDTVFFNTVMDHLCKNGRVIEAQDVFDLMVHMGVKPDVRSHVTLMHGYFADGKMDEMRKLLENMCSIGLKLMLSPIAY

SEQ ID NO: 702 - protein, 543 aa, Triticum aestivum
MPRFSSSTPMSPPRLRLRLGGRHSSSTSHPSRIWDPHAAFATGTERAVFGTLTTEDAHHLFDELLRHGNPVQERSLNNFLATLARAPTSASCSDGPALAVALFGRLSRGAGRRVAQPNVFTYGVLMDCCCRARRLDLVIAFFGRLLKTGLEADRVVFSTLLKGLCHAKRSDEALDVLLHRMPGLGCTPGVVAYNTVIHGFFKEGQVGKACNLFHEMAQQGVMPDVVTYSSVIDALCKARAMDKAEYFLRQMVDDGVVPNNVTYNSLIHGYSSSGHWKEAVRVFKEMTSRRVTPDVHTYNMFMTFLCKHGRSKEAAGIFETMAMKGLKPNNVSYAILLHGYATEGCLVDMINLFNSMTRDGIRPNCHTLNILINAYAKSGMMDEAMLIFKGMRKQGVSPDVVTYSTVIHAFCKMGSLDIAMDKFNQMVDMGVRPNAVVYHSLIQSFCTHGDFVKAKELVTEMRNKGMRPPDINFFHSIMQNLCTEGRVTEARDILDLIVHIGMRPDVLIFSLLIDGYCLVSKMEDASKIFDDMVSYGLEPSNIT

SEQ ID NO: 703 - protein, 543 aa, Triticum aestivum; identical to SEQ ID NO: 702

SEQ ID NO: 704 - protein, 543 aa, Triticum aestivum; identical to SEQ ID NO: 702

SEQ ID NO: 705 - protein, 543 aa, Triticum aestivum; identical to SEQ ID NO: 702

SEQ ID NO: 706 - protein, 543 aa, Triticum aestivum; identical to SEQ ID NO: 702

SEQ ID NO: 707 - protein, 418 aa, Triticum aestivum
MDCCCRARRLDLVIAFFGRLLKTGLEADRVVFSTLLKGLCHAKRSDEALDVLLHRMPGLGCTPGVVAYNTVIHGFFKEGQVGKACNLFHEMAQQGVMPDVVTYSSVIDALCKARAMDKAEYFLRQMVDDGVVPNNVTYNSLIHGYSSSGHWKEAVRVFKEMTSRRVTPDVHTYNMFMTFLCKHGRSKEAAGIFETMAMKGLKPNNVSYAILLHGYATEGCLVDMINLFNSMTRDGIRPNCHTLNILINAYAKSGMMDEAMLIFKGMRKQGVSPDVVTYSTVIHAFCKMGSLDIAMDKFNQMVDMGVRPNAVVYHSLIQSFCTHGDFVKAKELVTEMRNKGMRPPDINFFHSIMQNLCTEGRVTEARDILDLIVHIGMRPDVLIFSLLIDGYCLVSKMEDASKIFDDMVSYGLEPSNIT

SEQ ID NO: 708 - protein, 517 aa, Triticum aestivum
MRPCRTPLLDSTSPLSVLLLDHLHRNRPSPPPSASPPSAFWSPIAAFAAATKRARAGTLSPEDAHHLFDELLRQSNPVPNRFLNNFLAALARAPPSDVCGDGPALTVALFNRLCREEAGPCVAPPTIYTYSILMDSCCRVGRPDLGLAVFGRLLKSGFKADQITASSLLMCLCDVGQTNEPVDVLLRRISKLGCEPNVIPYNIVLKSLCDSRRSQQALDLLLMMAQRGCRSPDVVSYNIVIHGLFKEGEVSMACSLFYEMMRQRVMPNVVTYRSMIGALCKVGATDKAKMVLGHMVGNGFRPDMYTWNSFMASLCKQGRSKEAAQLFDYMVAKGYKPDVVTYSTLLHGYATEGCFTDMINLFNSMEGNGIVANSCVFNILIDAYAKRGMMHEAMLIFTEMRERRVSPDIFTYGIIIAALCRMGRLSDAMEKINEMVAAGLQPDKAVYYSLIQGFCTHDDLVKAKELVSEMMTKGIPRPNIVFFNSVIASLCKEGRVKDAHGIFDLAMNIGERPDLIH

SEQ ID NO: 709 - protein, 268 aa, Triticum aestivum
MSLLRLRLRLHARRSYSTSHPPRSQGWDPHAAFAAATERARSGNLTSEDAHKLFDQLLLQANPVNMRLPNDLLTALARAPAFAACSNGPALAVALFSRLSQSARQRVVQPTACTHGILMDCCCRAHRLDLALAFFARLLRTGLKAGVIEVNTLLKGLCRAKRADEALDILLHRMPELGCTPNVVAYTTVIHGFFKEGQVSKACNLFHEMALQGVTPDVVTYNSVIDALCKARAMDKAEYFLGQMVDDGVVPDNVTYNSLIHGYSFSGH

SEQ ID NO: 710 - protein, 519 aa, Triticum aestivum
MSLLRLRLRLHARRSYSTSHPPRSQGWDPHAAFAAATERARSGNLTSEDAHKLFDQLLLQANPVNMRLPNDLLTALARAPAFAACSNGPALAVALFSRLSQGARQRVVQPTACTHGILMDCCCNAHRLDLALAFFARLLRTGLKAGVIEVNTLLKGLCRAKRAHEALDILLHRMPELGCTPNVVAYTTVIHGFFKEGQVSKACNLFHEMALQGVTPDVVTYNSVIDALCKARAMDKAEYFLGQMVDDGVVPDNVTYNSLIHGYSFSGHWKEAVRVFKQMTSRRVTADVHTYNMFMTFLCKHGRSKEAAGIFDTMAIKGLKPDNVSYAILLHGYATEGCLVDMINLFNSMERDCILPDCRIFNILINAYAKSGKLDKAMLIFNEMQKQGVSPNAVTYSTVIDAFCKKGQLDDAMIKFNQMIDTGIRQGTTVYGFCTHGDLVKAKELLTEMMNKGIPPPDIKFFHSIMQNLGTEGRVIEARDVLGLIAHIGMRPNVCTFNILSGGYCLSARWRMPQKYLMI

SEQ ID NO: 711 - protein, 246 aa, Triticum aestivum
MTSRRVTADVHTYNMFMNFLCKHGRSKEAAGIFDTMAIKGLKPDNVSYAILLHGYATEGCLVDMINLFNSMERDCILPDCRIFNILINAYAKFGKLDKAMLIFNEMQKQGVSPNAVTYSTVIDAFCKKGQLDDAMIKFNQMIDTGIRQGTTVYGSLIQGFCTHGDLVKAKELVTEMMNKGIPPPDIKFFHSIMQNLGTEGRVIEARDVLGLIAHIGMRPNVCTFNILSGGYCLSARWRMPQKYLMI

SEQ ID NO: 712 - protein, 553 aa, Triticum aestivum
MVSIGEHARPPNSAFLLPNPSSCPGCVGAVGGERHRRPLGPLPLPDSSRSIGGAMSRRAVPAGRRILEQNIKARYRAGAIGTDDALHLFDELLQVAWPSSIATINCLLIVVGRDCPALAVSLFNHIARAKVAPHNITYGILVDCCSRAGRLDLGFAAMGHIVKTGFAAGSVISFSHLLRAVCAEKKTSYGMDIVLRIMPELNCIPDVYSYSILFKGLCNEKRSQEALELIHVMVEHGGSCQPNLVSYNTVIDGLLKEGEVGKAYSLFCEMVQSGILANIVTYNSIISGMCKEVERVFEHMSINGVQPNMITYNIQMDYLRKSGRCAEARKIFDSMVSLGQKPYVTTYSILLNGYVMEKSFHDMHCLLDLMVENGILPDHHVYNILISAYAKEEMASEVMHIFTKMRQQGLNPSVADYGAVINLHSSIGRMDDAMPQFNQMIAEGLAPDIIVFNPLISGFCTCGKWEKVHELFSEMLNRGTYPDTVFFTTIMDRLCKNGRVMEAQDMFDLMVHVGVKPNVHTYATLMHGYFFVRKMDEVRKLLGNMLSIGSKPD

SEQ ID NO: 713 - protein, 553 aa, Triticum aestivum
MVSIGEHARPPNSAFLLPNPSSCPGCAGAVGGERRRRPLGPLPLPDSSRSIGGAMSRRAVPAGRRILEQNIKARYRAGAIGTDDALHLFDELLQVAWPSSIAAINCLLIVVGRDCPALAVSLFNHIARAKVAPHNITYGILVDCCSRAGRLDLGFAAMGHIVKTGFAAGSVVSFSHLLRAVCAKKKTSYGMDIVLRIMPELNCIPDVYSYSILFKGLCNEKRSQEALELIHVMVEHGGSCQPNLVSYNTVIDGLLKEGEVGKAYSLFCEMVQSGILANIVTYNSIISGMCKEVERVFEHMSINGVQPNMITYNIQMDYLCKSGRCAEARKIFDSMVSLGQKPSVTTYSILLHGYVMEKSFHDMHCLLDLMVENGISPDHHVYNILISAYAKEEMASEVMHIFTKMRQQGSNPSVADYGAVINLLSSIGRMDDAMSQFNQMIAEGLAPDIIVFNPLISGFCTCGKWEKVHELFSEMLNRGTYPDTVFFTTIMDRLCKNGRVMEAQDMFDLMVHVGVKPNVHTYATLMHGYFFVRKMDEVRKLLGNVLSIGSKPD

SEQ ID NO: 714 - protein, 553 aa, Triticum aestivum
MVSIGEHARPPNSTFLLPNPSSCPGCAGAVGGERHRRPLGPLPLPDSSRSIGGAMSRRAVPAGRRILEQNIKARYRAGAIGTDDALHLFDELLQVAWPSSIAAINCLLIVVGRDCPALAVSLFNHIARAKVAPHNITYGILVDCCSRAGRLDLGFAAMGHIVKTGFAAGSVVSFSHLLRAVCAKKKTSYGMDIVLRIMPELNCIPDVYSYSILFKGLCNEKRSQEALELIHVMVEHGGSCQPNLVSYNTVIDGLLKEGEVGKAYSLFCEMVQSGILANIVTYNSIISGMCKEVERVFEHMSINGVQPNMITYNIQMDYLCKSGRCAEARKIFDSMVSLGQKPSVTTYSILLHGYVMEKSFHDMHCLLDLMVENGISPDHHVYNILISAYAKEEMASEVMHIFTKMRQQGSNPSVADYGAVINLLSSIGRMDDAMSQFNQMIAEGLAPDIIVFNPLISGFCTCGKWEKVHELFSEMLNRGTYPDTVFFTTIMDRLCKNGRVMEAQDMFDLMVHVGVKPNVHTYATLMHGYFFVRKMDEVRKLLGNVLSIGSKPD

SEQ ID NO: 715 - protein, 553 aa, Triticum aestivum
MVSIGEHARPPNSAFLLPNPSSCPGCVGAVGGERHRRPLGPLPLPDSSRSIGGAMSRRAVPAGRRILEQNIKARYRAGAIGTDDALHLFDELLQVAWPSSIAAINCLLIVVGRDCPALAVSLFNHIARAKVAPHNITYGILVDCCSRAGRLDLGFAAMGHIVKTGFAAGSVVSFSHLLRAVCAKKKTSYGMDIVLRIMPELNCIPDVYSYSILFKGLCNEKRSQEALELIHVMVEHGGSCQPNLVSYNTVIDGLLKEGEVGKAYSLFCEMVQSGILANIVTYNSIISGMCKEVERVFEHMSINGVQPNMITYNIQMDYLCKSGRCAEARKIFDSMVSLGQKPSVTTYSILLHGYVMEKSFHDMHCLLDLMVENGISPDHHVYNILISAYAKEEMASEVMHIFTKMRQQGSNPSVADYGAVINLLSSIGRMDDAMSQFNQMIAEGLAPDIIVFNPLISGFCTCGKWEKVHELFSEMLNRGTYPDTVFFTTIMDRLCKNGRVMEAQDMFDLMVHVGVKPNVHTYATLMHGYFFVRKMDEVRKLLGNVLSIGSKPD

SEQ ID NO: 716 - protein, 553 aa, Triticum aestivum; identical to SEQ ID NO: 715

SEQ ID NO: 717 - protein, 510 aa, Triticum aestivum
MMSELGCVPNAFSYSIVLKGLCDNSMCQRALELLQMLVEKEGACSLNVVAYSTVIHGFFKEGETSKACNLFDEMIQQGIVPDVVTYSSIIDALCKARAMDKSELVLRQMVANGAQPNEVTYNCMIHGYSTSGRWKEAVKLFREMKSRGLIPDIFTCNSLMTYHCKHGRSKEAAEFFYSMTAKGHKPDIVSYRILLHGYATEGCFPDMIDVFNSMENNGIAADCHVFNILIDAYSKRGMMDETMLITSKMQERRVNPDIVTYSSIIAGLSRLGRLTEAMEKFNQMIALGVQPNKVVYHALIQGFCIDGDLAKAKQLVSEMMNRGIPRPNISFFSSVIKSLCQEGRVMDAHDIFDLVIDMGERPDDILLNSLIDGYCLVGKMDKALKVLDVMESVGVEPDVITYNTLVNGYCRNGRINDGLTLFRDMARKRIKPDTVFILRHNGWVVSFWEICFCYGAARRRAREGRPGAFLPTAGQEGRDFLLNSCLIRLIHLLSLYREVYLTPKQGLLDP

SEQ ID NO: 718 - protein, 510 aa, Triticum aestivum; identical to SEQ ID NO: 717

SEQ ID NO: 719 - protein, 510 aa, Triticum aestivum
MMSELGCVPNAFSYSIVLKGLCDNSMCQRALELLQMLVEKEGACSLNVVAYSTVIHGFFKEGETSKACNLFDEMIQQGIVPDVVTYSSIIDALCKARAMDKSELVLRQMVANGAQPNEVTYNCMIHGYSTSGRWKEAVKLFREMKSRGLIPDIFTCNSLMTYHCKHGRSKEAAEFFYSMTAKGHKPDIVSYRILLHGYATEGCFPDMIDVFNSMENNGIAADCHVFNILIDAYSKRGMMDETMLITSKMQERRVNPDIVTYSSIIAGLSRLGRLTEAMEKFNQMIALGVQPNKVVYHALIQGFCIDGDLAKAKQLVSEMMNRGIPRPNISFFSSVIKSLCQEGRVMDAHDIFDLVIDMGERPDDILLNSLIDGYCLVGKMDKALKVLDVMESVGVEPDVITYNTLVNGYCRNGRINDGLTLFSDMPRKRIKPDTVFILRHNGWVVSLWEICFCYGAARRRAREGRPGAFLPTAGQEGRDFLLNSCLIRLIHLLSLYREVYLTPKQGLLDP

SEQ ID NO: 720 - protein, 510 aa, Triticum aestivum
MMSELGCVPNAFSYSIVLKGLCDNSMCQRALELLQMLVEKEGACSLNVVAYSTVIHGFFKEGETSKACNLFDEMIQQGIVPDVVTYSSIIDALCKARAMDKSELVLRQMVANGAQPNEVTYNCMIHGYSTSGRWKEAVKLFREMKSRGLIPDIFTCNSLMTYHCKHGRSKEAAEFFYSMTAKGHKPDIVSYRILLHGYATEGCFPDMIDVFNSMENNGIAADCHVFNILIDAYSKRGMMDETMLITSKMQERRVNPDIVTYSSIIAGLSRLGRLTEAMEKFNQMIALGVQPNKVVYHALIQGFCIDGDLAKAKQLVSEMMNRGIPRPNISFFSSVIKSLCQEGRVMDAHDIFDLVIDMGERPDDILLNSLIDGYCLVGKMDKALKVLDVMESVGVEPDVITYNTLVNGYCRNGRINDGLTLFSDMPRKRIKPDIVFILRHNGWVVSFWEICFCYGAARRRAREGRPGAFLPTAGQEGRDFLLNSCLIRLIHLLSLYREVYLTPKQGLLDP

SEQ ID NO: 721 - protein, 510 aa, Triticum aestivum; identical to SEQ ID NO: 717

SEQ ID NO: 722 - protein, 469 aa, Triticum aestivum
MSNLRLLRRSSSSMSTTRSPLSRVWSPHSAFAAATERVRTGTLSQDDAHHLFDELLRQATPVHERSLNSFLAALAHATSSAACIRDGRALAIALFNRVCREQSGPRVVPLTVHTYNILMDCCCRASRPDLGLAFFARLLRTGLKTNEITANTFLKCLCYAKRTDEALNVLLHRMSELGCVPDAISYNIVLKSLCEDSMSQWALDLLQMMAKEGGGCSPNVVAYSTVIHGFFKEGETGKACNLFHEMMHQGVEPSVWTYSSIIDALCKARAMDKAELVLQQMVNKGVQPNNVTYNCMIHGYSTSGQWKEAAKLLREMKSRDLIPDIVTRNSFLASLCKHGRSKEAAEFLDSMTAKGHKPDIVSYRILFHGCASEGCFADMIDLFNSMESNGIAADCHVFNILINGYAKRGMTEEAMLIFTEMRGQGVSPDVVTYSIVIAALSRMGRLTDAIEKFNEMTALEVQPDTTVYC

SEQ ID NO: 723 - protein, 469 aa, Triticum aestivum; identical to SEQ ID NO: 722

SEQ ID NO: 724 - protein, 469 aa, Triticum aestivum; identical to SEQ ID NO: 722

SEQ ID NO: 725 - protein, 469 aa, Triticum aestivum; identical to SEQ ID NO: 722

SEQ ID NO: 726 - protein, 534 aa, Triticum aestivum
MSRRFPPGAMSRRILERKIQDRYHAGHIGTHDALNLFDELIQVAGPSSVRAINCLLTVVGRDCPALGVSLFNRVARAKVPPHNITYSILVDCCCRAGRLDLGHAAMGHVIKLGFAAEAIVNFSHLLKAICAEKKTSYAMDIVLRIMPEFNCIPDVFSYSILFKGLCNEKRSQEALELIHIMAEDGGSCQPNVVSYNTVLDGLLKEGEVGKAYSLFCVMLQRGISPNVVTCTSIISGMCKVHAMDKAEEVLQQMTNRGILPNSATYNSLIHGYYSLGQCEEVDRIFKEMSRNGVQPDIVTYNIQMDYLCKSRRCAEARKIFDSMVSLGQKPDVTTYSILLHGYAMEKSFHDMLCLIDLMVGNGIAPNHYVYNILISAYAKEEMVDEVMHIFRKMRQKGLNPDAVSYGTVIHLLSRIGRMDDAMCQFAQIITEGLAPDIIVFNSLISGFCSCGKWEKVHELFSEMLDCGICPDRVFFNTVMDHLCKNGRVMEAQDVFDLMVHMGVKPFVRDYNTLIHGYCLVGKMDEGRKLLDNMF

SEQ ID NO: 727 - protein, 517 aa, Triticum aestivum
MRPCRTPLLDSTSRLSVLLLDHLHRNRPSPPPSPSPPSAFWSPIAAFAAATKRARAGTLSPEDAHHLFDELLRQSIPVPNRFLNSFLAALARAPASDACGDGPALTVALFNRLCREEAGPCVAPPTIYTNNILMDSCCRVGRPDLGLAVFGRLLKSGLKADQITASSLLMCLCDVGRTNEAVDVLLHRISELGCEPNVIPYNIVLKSVCDSRRSQQALDLLQMMAQRGCCSPNVVSYNTVIHGLFKEGEVSMACSLFYEMMRQRVMPNVVTYRSMIGALCKVGATDKAKLVLGHMVGNGFQPDMYTWNSFMASLCKQGRGKEAAQLFDYMVAKGHKPDVVMYSTLLHGYATEGCFTDMINHFNSMEGNGIVANSRVFNILIDAYAKRGMMHEAMLIFTEMRERRVSPDIFTYGIIIAALCRMGRLSDAMEKINEMVATGLQPNEAVYYSLIQGFCTHDDLVKAKELVSEMMTKGIPRPNIVFFNSVIASLCKEGRVKDAHGIFDLAMNIGERPDLIH

SEQ ID NO: 728 - protein, 336 aa, Triticum aestivum
MLLHRMPGDMPDVISYSVIIKSFCDNGRSQRALDLLRMMTKKGSDHSPNVVSYTIIIGGLIKEGELSKACALFHEMMQQGVVPDVVTYSSIIDGLCKARALDEAEVVLRQMIDSGVRPNAVTYGSLIHGYSTSGQFEEVVRLLEEMRGQGVEPNLFTHNTVMDYLCKHGRTKEAAELFYSMAEKGHKPNMVSFSIMLHGYAIEGSLAEMTDLCELMARDGIVPNICIFNILINAYAKCGIMDVAMLFFEDMLKQGVTPDEVTYLAVIAGYCRMGRMDDAIKKFNEMIDMGVPHSLTIYRCMIHGYFRHGNFLKAKELITEMKNKGIRPCPRKKPKN

SEQ ID NO: 729 - protein, 531 aa, Triticum aestivum
MKFSAVPSLVECLTSAGHPPSSGLSSPTRSHIRHCRKEQDLPRLARLSSSSGSSQANQLLNKLKDHLGSGMLRPELAHQLFDKLFPQTVPVSADALNVLFSALACGLPSAACNDGPALAIALFKHMARTRCRQVMAPTNHTYNTLIECCHMARRPDIGPAFFGLLLKTGIMVDVFTFNSLLKCLCDMKQTDEALGVLLHRMPGDMPDVISYSVIIKSFCDNGRSQRALDLLRMMTKKRSDHSPNVVSYTIIIDGLIKEGELSKACALFHEMMQQGVVPDVVTYSSIIDGLCKARALDEADVVLRQMIDSGVRPNVVTYGSLIHGYSTSGQFEEVVRLLEEMRGQGVEPNLFTHNTVMDYLCKHGRTKEAAELFYSMAEKGHKPNMVSFSIMLHGYAIEGSLAEMTDLCELMARDSIVPNICIFNILINAYAKCGIMDVAMLFFEDMLKQGVTPDEVTYLAVIAGYCRMGRMDDAIEKFNEMIDMGVPHSLTIYRCIIHGYFRHGKFLKAKELITEMKNKGIRPCPRKKPKN

SEQ ID NO: 730 - protein, 336 aa, Triticum aestivum; identical to SEQ ID NO: 728

SEQ ID NO: 731 - protein, 336 aa, Triticum aestivum; identical to SEQ ID NO: 728

SEQ ID NO: 732 - protein, 336 aa, Triticum aestivum; identical to SEQ ID NO: 728

SEQ ID NO: 733 - protein, 336 aa, Triticum aestivum; identical to SEQ ID NO: 728

SEQ ID NO: 734 - protein, 336 aa, Triticum aestivum; identical to SEQ ID NO: 728

SEQ ID NO: 735 - protein, 503 aa, Triticum aestivum
MTNRSVTPDVCTYNLLMTSLYKNGNSKEAAQLFYSMATKGLKPDTVSYAILLHGYATEGCLVDMINLFNSMATDCILPNCHIFNILIYAYAKSGKLDKAMLIFKDMQKQGVSPDAVTYSTVIHAFCKKGRLDDAVTKFNQMIDTGVQPEASAYRSLIQGFCTHGDLVKAKEYVTEMMKKGMLPPDIMFFSSIMQKLCTEGRVIEARDILDLIVRIGMRPNVFIFNILIGGYCLGCKMEDATKMFEDMVSFGLEPCNITYGILINGYCKSRRIDDGLILFQEMLHKGLKPTTFNYNVILDGLFLAGRTIAAKEKFDEMVESGVSVCTDTYSIVLAGLCRNNCFSEVIMLFQKLRAMNMKFNIRIVTIIIDAFYKVRRNQEAKDLFAAIPSNGLVANVVTYSIMMKNLIKEGSVEEADTLFLSMEKSGCTANSWMLNHIIRRLLERGEIVKAGNYISKVDAKSYSLEAKTVSLLISLFSGKGKYREHIKLLPMKYQFLEEAATVE

SEQ ID NO: 736 - protein, 305 aa, Triticum aestivum
MTNRSVTPDVCTYNLLMTSLYKNGNSKEAAQLFYSMATKGLKPDTVSYAILLHGYATEGCLVDMINLFNSMATDCILPNCHIFNILIYAYAKSGKLDKAMLIFKDMQKQGVSPDAVTYSTVIHAFCKKGRLDDAVIKFNQMIDTGVRPEASAYRSLIQGFCTHGDLVKAKEYVTEMMKKGMLPPDIMFFSSIMQKLCTEGRVIEARDILDLIVRIGMRPNVFMFNILIGGYCLVCKMEDATKMFEDMVSFGLEPCNITYGILINGYCKNRRIDDGLILFQEMLHKGLKPTTFNYNVILDGLFLAG

SEQ ID NO: 737 - protein, 300 aa, Triticum aestivum
MPQLGVQPNVVIYTSIIDALSKCGAMDKAEVVLQQMVDQGIEPNIRTYTSLIHGYSASGQWKAAARVFKEMVSVGVLPNAVTLNSFMDSLCKHRRTKDARDIFDSMAAKGQKPDIFSYSIMLNGYAKEGYFEDMTDLFNLMVLNGIVPNHHIFNILINAYAKRGLMDEAMHMFEVMRQQGVNPNVVDYVVVMDSLCKMGRMDAALDKFTQMVNQGVSPNKAVYQCLVLGSCSHGHFVKAKELISEAINRGLFSNSVFFYPVINDLCKEGKVKEAQDMFDFILGIGRRPDVIMYNSLMDGY

SEQ ID NO: 738 - protein, 300 aa, Triticum aestivum; identical to SEQ ID NO: 737

SEQ ID NO: 739 - protein, 195 aa, Triticum aestivum
MAAKGQKPDIFSYSIMLNGYAKEGYFEDMTDLFNLMVLNGIVPNHHIFNILINAYAKRGLMDEAMHMFEVMRQQGVNPNVVDYVVVMDSLCKMGRMDAALDKFTQMVNQGVSPNKAVYQCLVLGSCSHGHFVKAKELISEAINRGLFSNSVFFYPVINDLCKEGKVKEAQDMFDFILGIGRRPDVIIYNSLMDGY

SEQ ID NO: 740 - protein, 432 aa, Triticum aestivum
MTTLLPRVSTGTRRGERKGSPRCPLRRPGGTHRRHRAGVGHSPDVFTYSTLVSALCRMGKLADAMDKFSEMIGTGVQPGTVVYHSLIQGFCTHGDLVKAKELVYEMMNKGSPCPNIAFFSSIVDSLCKEGRVMDAHHIFDLVKDIGERPDIIMFNTLIDGYCLVGEMEKACGVFDAMVSAVVEPDVITYSTLVSGYCKSGRIDDGLNLFTEMLHKKVKPTTVTYGTILDGLFCAGRSAAAKKVFHEMIESGIMVSISTYNIILGGLCRNNCADEAIVLFQKLCAMNVKFNITTLNTMLNAFYKVQRREEASDLFAALPASGLVPNASTYGVMIQNLLKEGAVEEADSMFSSMEKSGCAPSSRFLNYIIRTLLEKGEIDKAGKYMSKVDGKTILLEASTTSLLMSLFSRGGKYQEHILLLPAKYQLFSGVNHS

SEQ ID NO: 741 - protein, 432 aa, Triticum aestivum; identical to SEQ ID NO: 740

SEQ ID NO: 742 - protein, 432 aa, Triticum aestivum; identical to SEQ ID NO: 740

SEQ ID NO: 743 - protein, 432 aa, Triticum aestivum; identical to SEQ ID NO: 740

SEQ ID NO: 744 - protein, 416 aa, Triticum aestivum
MHIYAKRGLIDEAVLILTEMRGHGLSPDVFTYSTLVSALCRMGKLADAMDKFSEMIGTGVQPGTVVYHSLIQGFCTHGDLVKAKELVYEMMNKGSPCPNIAFFSSIVDSLCKEGRVMDAHHIFDLVKDIGERPDIIMFNTLIDGYCLVGEMEKACGVFDAMVSAVVEPDVITYSTLVSGYCKSGRIDDGLNLFTEMLHKKVKPTTVTYGTIPDGLFCAGRSAAAKKVFHEMIESGIMVSISTYNIILGGLCRNNCADEAIVLFQKSCAMNVKFNITTLNTMLNAFYKVQRREEASDLFAALPASGLVPNASTYGVMIQNLLKEGAVEEADSMFSSMEKSGCAPSSRFLNYIIRTLLEKGEIDKAGKYMSKVDGKTILLEASTTSLLMSLFSRGGKYQEHILLLPAKYQLFSGVNHS

SEQ ID NO: 745 - protein, 432 aa, Triticum aestivum; identical to SEQ ID NO: 740

SEQ ID NO: 746 - protein, 432 aa, Triticum aestivum; identical to SEQ ID NO: 740

SEQ ID NO: 747 - protein, 225 aa, Triticum aestivum
MVSYGMDEAMHMFEVMRQQGVNPDVFGYQIIMDSLCKMGKMDAALDKFNQMVNQGVSPNKAVYQCLVLGSCSHGDFVKAKELISEAVNRGMCSNSVFFYPVINDLCKEGKVKEAQDMFDFILGIGQRPDVIMYTSLMDGYCLVGKVEKALSVLDAMKFAGLQPDDVVYGTLLNSYCKIGRIADGLSLFRKCHSAGLSPRLLYTTLYWMGCFALGEQVLQRKNSIR

SEQ ID NO: 748 - protein, 225 aa, Triticum aestivum; identical to SEQ ID NO: 747

SEQ ID NO: 749 - protein, 470 aa, Triticum aestivum
  SITE 24: note = misc_feature - Xaa can be any naturally occurring amino acid
  REGION 251..252: note = misc_feature - Xaa can be any naturally occurring amino acid
  SITE 349: note = misc_feature - Xaa can be any naturally occurring amino acid
MDFTATDVFQHSPYGDILNSLKSXSLSGEPWPNCQAKRSNEALDMLLHRTPELHCAPDVFSYNIVINGCLKEGEVDKACNLFHEMPQLGVQPDVVTYTSIMDALSKSGAMDKAEVLLRQMVDQGIEPNIKTYSYLIHGYSTFGQWKEALRVFKEMASLGVVPDVVTLTSLIDSLCKHRRTKEARESFDSMAAKGLKPNIVSYSTMLNGYVKEGSFEDMTDLFNSMVRNGIVPNHHIFNILINAYAKRGGVXXEAMHMFEVMRQQGVNPDVFDYQIIMDSLCKMGRMDAALDKFNQMVNQGVSPNKAVYQCLVLGSCSHGHFVKAKELISEVVNRGLCSNSVFFYPVINXLCKEGKVKEAQDMFDFILGIGQRPDVIMYTSLMDGYCLVGKVEKALSVLDAMKFAGLQPDDVVYGTLLNSYCKIGRIADGLSLFRKCHSAGLSPRLLYTTLYWMGCFALGEQVLQRKNSIR

SEQ ID NO: 750 - protein, 225 aa, Triticum aestivum; identical to SEQ ID NO: 747

SEQ ID NO: 751 - protein, 509 aa, Triticum aestivum
MGEAELEPRGGGLGLRGDGGRCGRLGGVVVGPGRGAAAVPGARGGGWGWLFFGLLGGRRRRPGGQGSRSGGWLLRQRLQAWRGADPVVRDLPTHQGHASLLLHHANGATPPPPPTRLPPLLLHLSSLTHLGSPRRLRRRRRPRALWQPHRGGRTPPVRRIAAAGQSCPGPPPQQTSLRPRPCSGVRGLRRRPALAVALFSRISQGARRRVAEPTACTYGILMDCCSRACCPELALAFFARLLRSGLRVGVIEVRTLLKGLCHAKRAEEAMDVLLHRMPELGCTPGVVAYNTVINGFFKEGQVGKACSLFHGMPQRGVLPDVVTYTSVVDGLCKARAMDKAEYFLRQMVDSGVVPDNVTYNSLIHGYSSLGHQKEAVRVLKEMNRRVTPDVITCTSLMAFLCKNGKSKEAAEIFDSMATKGLKHDAVSYAILLHGYATEGCLVDMINLFNSMDRDCILPDGRIFNILINAYAKSGNLDKAMLIFKEMQKQGVSPDAVTYSTVIHAFCKKG

SEQ ID NO: 752 - protein, 288 aa, Triticum aestivum
MDCCSRACCPELALAFFARLLRSGLRVGVIEVRTLLKGLCHAKRAEEAMDVLLHRMPELGCTPGVVAYNTVINGFFKEGQVGKACSLFHGMPQRGVLPDVVTYTSVVDGLCKARAMDKAEYFLRQMVDSGVVPDNVTYNSLIHGYSSLGHQKEAVRVLKEMNRRVTPDVITCTSLMAFLCKNGKSKEAAEIFDSMATKGLKHDAVSYAILLHGYATEGCLVDMINLFNSMDRDCILPDGRIFNILINAYAKSGNLDKAMLIFKEMQKQGVSPDAVTYSTVIHAFCKKG

SEQ ID NO: 753 - protein, 509 aa, Triticum aestivum; identical to SEQ ID NO: 751

SEQ ID NO: 754 - protein, 509 aa, Triticum aestivum
  SITE 24: note = misc_feature - Xaa can be any naturally occurring amino acid
MGEAELEPRGGGLGLRGDGGRCGXLGGVVVGPGRGAAAVPGARGGGWGWLFFGLLGGRRRRPGGQGSRSGGWLLRQRLQAWRGADPVVRDLPTHQGHASLLLHHANGATPPPPPTRLPPLLLHLSSLTHLGSPRRLRRRRRPRALWQPHRGGRTPPVRRIAAAGQSCPGPPPQQTSLRPRPCSGVRGLRRRPALAVALFSRISQGARRRVAEPTACTYGILMDCCSRACCPELALAFFARLLRSGLRVGVIEVRTLLKGLCHAKRAEEAMDVLLHRMPELGCTPGVVAYNTVINGFFKEGQVGKACSLFHGMPQRGVLPDVVTYTSVVDGLCKARAMDKAEYFLRQMVDSGVVPDNVTYNSLIHGYSSLGHQKEAVRVLKEMNRRVTPDVITCTSLMAFLCKNGKSKEAAEIFDSMATKGLKHDAVSYAILLHGYATEGCLVDMINLFNSMDRDCILPDGRIFNILINAYAKSGNLDKAMLIFKEMQKQGVSPDAVTYSTVIHAFCKKG

SEQ ID NO: 755 - protein, 505 aa, Triticum aestivum
MPRVRPGSSSSTVSARANQQLLNKLKDHLDSGTLQPERAHQLFDKLLRQTVPVSACALNGLFASLARALPSAACTDGSALAIALFNRMAREGRRVIAPNIYTYSILIDCCCRSRRPDLGPAFFGFLLKTGIKADIITFTSLFKCLCDMKRIDEAVGVLLHRMPGDMPDVISYSTILKGFCNEGRSQLALNLLQMMVKKGAGHSPNVVSYNMVIDGFFKEGEVSKACNLFHEMKQRGVVPDVWTYNSIIDAMCKARAMDKAKLVLRQMVDSGVQPDIVTYNKLIHGYSISGQFEEVVRLLDKMRSQGVKPTVFTCNTVMDYLCKHGRIKEAAEFFYSMVEKGLKPNIVSYAIMFRGYAKEGSLVEMTDLCELMARDGIVPDLHCFNILINAYAKCGMMDVAIFFFKDMLKQGVNPDEVTYLAVIAGYCRVGMMDDAMENFNEMIGMGVPHNATVYRCMIQGYLNHGDFLKAKELITEMKTKGIHPRPRKSQGYLMTQLFTSMECWS

SEQ ID NO: 756 - protein, 505 aa, Triticum aestivum; identical to SEQ ID NO: 755

SEQ ID NO: 757 - protein, 504 aa, Triticum aestivum
MPRVRPGSSSSTVSARANQLLNKLKDHLDSGTLQPERAHQLFDKLLRQTVPVPASALNGLFAALARALPSAACTDGPALAIALFNRMAREGRRVIAPNIYTYSILIDCCCRSRRPDLGPAFFGFLLKTGIKADIITFTSLFKCLCDMKRIDEAVGVLLHRLPGDMPDVISYSTILKGFCNEGRSQLALNLLQMMVKKGAGHSPNVVSYNMVIDGFFKEGEVSKACNLFHEMKQRGVVPDVWTYNSIIDAMCKARAMDKAKLVLRQMVDSGVQPDIVTYNKLIHGYSISGQFEEVVRLLDKMRSQGVKPTVFTCNTVMDYLCKHGRIKEAAEFFYSMVEKGHKPNIVSYAIMFRGYAKEGSLVEMTDLCELMARDGIVPDLHCFNILINAYAKCGMMDVAILFFKDMLKQGVNPDEVTYLAVIAGYCRVGMMDDAMENFNEMIGMGVPHNATVYRCMIQGYLNHGDFLKAKELITEMKTKGIHPRPRKSQGIDPGYLMTQLFTGA

SEQ ID NO: 758 - protein, 505 aa, Triticum aestivum; identical to SEQ ID NO: 755

SEQ ID NO: 759 - protein, 505 aa, Triticum aestivum; identical to SEQ ID NO: 755

SEQ ID NO: 760 - protein, 504 aa, Triticum aestivum; identical to SEQ ID NO: 757

SEQ ID NO: 761 - protein, 475 aa, Triticum aestivum
MMQQGIVPNVVTYSSIIDALCKVRAMDKAKLVLQQMVDNGVQPDVVTWNSFMYSFCKHGKSKEAAEFFDSMTTKGLKPDIVAYSTLLHGYATEGCLADMINLFNTMEDNGIVANCNVFNILIDAYAKRGMMHEAMLIFTEMQEQRVSLDVCTYATVIAALCRMGRLADAMDKLNEMIAMGLQPNKVVYHSLIQGFCTHSDLVKAKALVSEMMNKGIPRPNIVFFSSVINSLCKEGRVTDAHDIFDLAINIGERPDVITFNSLIDGYCLAGKMDKAFGVLDAMVSAGIEHNVVTYNTLVDGYSRNGRIDDGLTLFREMTRNKIKPTTATYGAILHGLFRAGRTSSAKKMFNEMIESGTTVDIPIYAIILGGLCRNNCVDEAIILFEKLGAMNVKLDVGIFNTMINAVYTVKGREEAKDLFAAISANWLVPNASSYGVMITNLLREGLVEEADNMFSSMDKSGCAPSSRLLNIIIRM

SEQ ID NO: 762 - protein, 475 aa, Triticum aestivum; identical to SEQ ID NO: 761

SEQ ID NO: 763 - protein, 475 aa, Triticum aestivum; identical to SEQ ID NO: 761

SEQ ID NO: 764 - protein, 475 aa, Triticum aestivum; identical to SEQ ID NO: 761

SEQ ID NO: 765 - protein, 475 aa, Triticum aestivum; identical to SEQ ID NO: 761

SEQ ID NO: 766 - protein, 475 aa, Triticum aestivum; identical to SEQ ID NO: 761

SEQ ID NO: 767 - protein, 501 aa, Triticum aestivum
MLRRIRLRRRPYPSCTYPEPVLCHSSSFISAAPLLRLHQYRTTTTPMSRIHLRRRLFSSTTRPSHSWSPHAAFAAATERVRTGALSQDDAHHLFDELLRQATPVPGRSLNGFLAALARAPASGACRDGPALALALFNRVCLDESGARVAPPTIFTYGILMNCCCRAHRPDLGLAFLARLLRTGLKADQIVANTFLKCLCCAKRTDEAVNVLLHRMPRLGCVPNAFSYSIVLKSLCDNGMSRQALDLLHMMAKEGGGCSPNVVAYSTVIHGFFKEGETGKACNLFHEMMQQGVEPNVWTYSSIIDALCKARAMDKAELVLEKMVNKGVQPNNVTYNCMIHGYSTSGQLKEAAKMFREMTSQGLIPDNFTCSSLMTYLCKHGRSKEAAEFFDAMTAKGHRDVISYCILLHGYANEGCFADMIDLFNSMQRNGIAANCHVFNILINGYAKRGMTDEAMLIFTEMWEKGVSPDVVTYSTVIAALSRMGGLTDAMEKFNQMIAMGI

SEQ ID NO: 768 - protein, 490 aa, Triticum aestivum
  SITE 45: note = misc_feature - Xaa can be any naturally occurring amino acid
  SITE 47: note = misc_feature - Xaa can be any naturally occurring amino acid
  SITE 52: note = misc_feature - Xaa can be any naturally occurring amino acid
MWWRIARSSMAFLRRVKQGRHAVYSMTAKGQKPDIISYCTLLHGXAXEGCFXDMIDLFNSMKSNGIAADCRVFTILIDAYAKRGMMDDAMHIFTEMWEKGVSPDVVTYSTVIAALSRMGRLTDAMDKFNQMISMGVQPNTVVYHTLIQGSCMHGDLIKAKELVSEMMNKGIPRPSIAFFGSIINRLCKDGRVMDAHDIFDLVIDIGERPSVITFNSLVDGYCLVGKMDKAFGMLNAMESVGVEPDIVTYSTLLDGYFKNGRINDGLTLFREMPLKRIKPDTVTYGIMLDGCFRAGRTVAARTMFHEMIESGITVDIPTYNIVLRGLCRNNCTDEAIALFQKLGAMSMKFNIAILNTMINAIYKVRRREEANNLFAAISASGLVPNQSTYAVMIINLLKDGAVEHASNMFSSMEKSGIVPSSRLINGIIRLLLENGEIAKAGIYLSKVDGNSISLEASTTSLMLSLFSRKGKYQEDMKLLPAKYQFFGEFG

SEQ ID NO: 769 - protein, 503 aa, Triticum aestivum
MPRVRPGSSSSTVSSRANQLLNKLKDHLGSGTLQPERAHQLFDKLLRQTVPVSAFALNGLFAALARALPSAACTDGPALAIALFNRMAREGRRVIEPNIYTYNILIDCCCRSRHPDLGPAFFGFLLKTGIKADIITFNSLLKCLCDMMQMEEALNMLLYRMPELPDSISYSIIIKSLCDNGRSQCALDLLRMKAKKGADHYPGLVAYNRVINGLIKEGELSKACSLFHEMMQQGVVPNVVTYSSIIDALCKAGAMDKAEVALRQMVGNGVRPDIFTYTSLIHGYSISGQFEEVVRLLEKLRSQGVKPTVFTCNTVMDYLCKHGKIKEAAEFFYSMPEKGHKPNIVSYSIMLYGYAKEGSLVEMTDLCELMARDGIVPDLHCLNILINAYAKCGMMDVAMLFFKDMLKQGVNPDEVTYLAVITGYCRVGMMDDAMEKFNEMIDMGVPRNSTVYRCMIQGYLNHGDFLKAKVLTTEMKTKGIHPRPRKSQRIDSGYLMTQLFTGA

SEQ ID NO: 770 - protein, 503 aa, Triticum aestivum
MPRVRPGSSSSTVSSRANQLLNKLKDHLGSGTLQPERAHQLFDKLLRQTVPVSAFALNGLFAALARALPSAACTDGPALAIALFNRMAREGRRVIEPNIYTYNILIDCCCRSRHPDLGPAFFGFLLKTGIKADIITFNSLLKCLCDMMQMEEALNMLLYRMPELPDSISYSIIIKSLCDNGRSQCALDLLRMKAKKGADHYPGLVAYNRVINGLIKEGELSKACSLFHEMMQQGVVPNVVTYSSIIDALCKAGAMDKAEVALRQMVGNGVRPDIFTYTSLIHGYSISGQFEEVVRLLEKLRSQGVKPTVFTCNTVMDYLCKHGKIKEAAEFFYSMPEKGHKPNIVSYSIMLYGYAKEGSLVEMTDLCELMARDGIVPDLHCLNILINAYAKCGMMDVAMLFFKDMLKQGVNPDEVTYLAVITGYCRVGMMDDAMEKFNEMIDMGVPHNSTVYRCMIQGYLNHGDFLKAKVLTTEMKTKGIHPRPRKSQRIDSGYLMTQLFTGA

SEQ ID NO: 771 - protein, 503 aa, Triticum aestivum; identical to SEQ ID NO: 770

SEQ ID NO: 772 - protein, 503 aa, Triticum aestivum; identical to SEQ ID NO: 770

SEQ ID NO: 773 - protein, 503 aa, Triticum aestivum; identical to SEQ ID NO: 770

SEQ ID NO: 774 - protein, 503 aa, Triticum aestivum; identical to SEQ ID NO: 769

SEQ ID NO: 775 - protein, 303 aa, Triticum aestivum
MDCCCRARRPDLGLALFGRFLGTGLRTNEIVATTFLKCLCCAKRTEEVVKVLLHRMPELGCVPNAISYSIVLKSLCENSMSQQALDLLQMVGKEGGCLRDVVAYNTIIHGFFKEGGIDKACHLFHEMMRQGVVPTVVTYNTVIDALCKAGEMDKAELVFQQMARNGAQPNKVTCNGSKFSSLTDGYCSVGKMDKTFKLLDAMVSVGIEPDAVTYSALLDGYFKNGRIDDGLTLFREMSCKGVKPTTVTYGIILDGLYRAGRTAAAKKMFDQMIKSGITVTVSIYTTPSFPVYKAYFNFFVFPI

SEQ ID NO: 776 - protein, 303 aa, Triticum aestivum; identical to SEQ ID NO: 775

SEQ ID NO: 777 - protein, 303 aa, Triticum aestivum
MDCCCRARRPDLGLALFGRFLGTGLRTNEIVATTFLKCLCCAKRTEEVVKVLLHRMPELGCVPNAISYSIVLKSLCENSMSQQALDLLQMVGKEGGCLRDVVAYNTIIHGFFKEGGIDKACHLFHEMMRQGVVPTVVTYNTVIDALCKAGEMDKAELVFQRMARNGAQPNKVTCNGSKFSSLTDGYCSVGKMDKTFKLLDAMVSVGIEPDAVTYSALLDGYFKNGRIDDGLTLFREMSCKGVKPTTVTYGIILDGLYRAGRTAAAKKMFDQMIKSGITVTVSIYTTPSFPVYKAYFNFFVFPI

SEQ ID NO: 778 - protein, 303 aa, Triticum aestivum; identical to SEQ ID NO: 775

SEQ ID NO: 779 - protein, 504 aa, Triticum aestivum
MPNANGVKMFVISRYTVVLTFLVNFSHLLKAICAEKKTSYAMDIVLRVMPEFNYVPNIFSYNILFKGLCNEKRSQEALELIQIMVEDGGGCRPDVVTYSTVIDGLLKEGEVDQAYSLFSEMLRQGVSPNIVTCNSIISGMCKLHAMDKAEEVLQQMLDRRILPDVTTYTSLIHGYYSLGQCEEVDRVFKEMSRNGVQPNIITYSIQMDYLCKNGRCTEARKIFDSMVSLGQKPDVTTYSILLHGYAMERSFHDIHCLIDLMVENGLSPNNYIYNILISACAKEKMVDEAMHIFTKMRQQGLNPDAVSYGTVIDLLSSFGRMDDAMSLFNKMITEGLAPGIIVFNHLISGFCTCGKWVKVHELFSEMLDRGICPNTVFFNTIMDRLCKNGRVMDAQDLFDLMIHMGVKPDVCTYSTLIGGYLFVGKMDEVRKLLENMCSIGLKPDVVTYSILIDGYSKNGRIDDALVVIREMDGVKPSIITFNIMIGVLLKGSRMEEAKDLFDGI

SEQ ID NO: 780 - protein, 504 aa, Triticum aestivum
  SITE 204: note = misc_feature - Xaa can be any naturally occurring amino acid
  SITE 357: note = misc_feature - Xaa can be any naturally occurring amino acid
MPNANGVKMFVISRYTVVLTFLVNFSHLLKAICAEKKTSYAMDIVLRVMPEFNCVPNIFSYNILFKGLCNEKRSQEALELIQIMVEDGGGCRPDVVTYSTVIDGLLKEGEVDQAYSLFSEMLRQGVSPNIVTCNSIISGMCKLHAMDKAEEVLQQMLDRRILPDVTTYTSLIHGYYSLGQCEEVDRVFKEMSRNGVQPNIITYXIQMDYLCKNGRCTEARKIFDSMVSLGQKPDVTTYSILLHGYAMERSFHDIHCLIDLMVENGLSPNNYIYNILISACAKEKMVDEAMHIFTKMRQQGLNPDAVSYGTVIDLLSSFGRMDDAMSLFNKMITEGLAPGIIVFNHLISGFCTCGKWXKVHELFSEMLDRGICPNTVFFNTIMDRLCKNGRVMDAQDLFDLMIHMGVKPDVCTYSTLIGGYLFVGKMDEVRKLLENMCSIGLKPDVVTYSILIDGYSKNGRIDDALVVIREMDGVKPSIITFNIMIGVLLKGSRMEEAKDLFDGI

SEQ ID NO: 781 - protein, 504 aa, Triticum aestivum
MPNANGVKMFVISRYTVVLTFLVNFSHLLKAICAEKKTSYAMDIVLRVMPEFNCVPNIFSYNILFKGLCNEKRSQEALELIQIMVEDGGGCRPDVVTYSTVIDGLLKEGEVDQAYSLFSEMLRQGVSPNIVTCNSIISGMCKLHAMDKAEEVLQQMLDRRILPDVTTYTSLIHGYYSLGQCEEVDRVFKEMSRNGVQPNIITYIIQMDYLCKNGRCTEARKIFDSMVSLGQKPDVTTYSILLHGYAMERSFHDIHCLIDLMVENGLSPNNYIYNILISACAKEKMVDEAMHIFTKMRQQGLNPDAVSYGTVIDLLSSFGRMDDAMSLFNKMITEGLAPGIIVFNHLISGFCTCGKWEKVHELFSEMLDRGICPNTVFFNTIMDRLCKNGRVMDAQDLFDLMIHMGVKPDVCTYSTLIGGYLFVGKMDEVRKLLENMCSIGLKPDVVTYSILIDGYSKNGRIDDALVVIREMDGVKPSIITFNIMIGVLLKGSRMEEAKDLFDGI

SEQ ID NO: 782 - protein, 359 aa, Triticum aestivum
MDKAEEDLQQMHDRRILPDVTTYTSLIHGYYSLGQCEEVDRVFKEMSRNGVQPNIITYSIQMDYLCKNGRCTEARKIFDSMVSLGQKPDVTTYSILLHGYAMERSFHDIHCLIDLMVENGLSPNNYIYNILISACAKEKMVDEAMHIFTKMRQQGLNPDAVSYGTVIDLLSSFGRMDDAMSLFNKMITEGLAPGIIVFNHLISGFCTCGKWVKVHELFSEMLDRGICPNTVFFNTIMDRLCKNGRVMDAQDLFDLMIHMGVKPDVCTYSTLIGGYLFVGKMDEVRKLLENMCSIGLKPDVVTYSILIDGYSKNGRIDDALVVIREMDGVKPSIITFNIMIGVLLKGSRMEEAKDLFDGI

SEQ ID NO: 783 - protein, 504 aa, Triticum aestivum
  SITE 204: note = misc_feature - Xaa can be any naturally occurring amino acid
MPNANGVKMFVISRYTVVLTFLVNFSHLLKAICAEKKTSYAMDIVLRVMPEFNCVPNIFSYNILFKGLCNEKRSQEALELIQIMVEDGGGCRPDVVTYSTVIDGLLKEGEVDQAYSLFSEMLRQGVSPNIVTCNSIISGMCKLHAMDKAEEVLQQMLDRRILPDVTTYTSLIHGYYSLGQCEEVDRVFKEMSRNGVQPNIITYXIQMDYLCKNGRCTEARKIFDSMVSLGQKPDVTTYSILLHGYAMERSFHDIHCLIDLMVENGLSPNNYIYNILISACAKEKMVDEAMHIFTKMRQQGLNPDAVSYGTVIDLLSSFGRMDDAMSLFNKMITEGLAPGIIVFNHLISGFCTCGKWEKVHELFSEMLDRGICPNTVFFNTIMDRLCKNGRVMDAQDLFDLMIHMGVKPDVCTYSTLIGGYLFVGKMDEVRKLLENMCSIGLKPDVVTYSILIDGYSKNGRIDDALVVIREMDGVKPSIITFNIMIGVLLKGSRMEEAKDLFDGI

SEQ ID NO: 784 - protein, 504 aa, Triticum aestivum
MPNANGVKMFVISRYTVVLTFLVNFSHLLKAICAEKKTSYAMDIVLRVMPEFNCVPNIFSYNILFKGLCNEKRSQEALELIQIMVEDGGGCRPDVVTYSTVIDGLLKEGEVDQAYSLFSEMLRQGVSPNIVTCNSIISGMCKLHAMDKAEEVLQQMLDRRILPDVTTYTSLIHGYYSLGQCEEVDRVFKEMSRNGVQPNIITYSIQMDYLCKNGRCTEARKIFDSMVSLGQKPDVTTYSILLHGYAMERSFHDIHCLIDLMVENGLSPNNYIYNILISACAKEKMVDEAMHIFTKMRQQGLNPDAVSYGTVIDLLSSFGRMDDAMSLFNKMITEGLAPGIIVFNHLISGFCTCGKWVKVHELFSEMLDRGICPNTVFFNTIMDRLCKNGRVMDAQDLFDLMIHMGVKPDVCTYSTLIGGYLFVGKMDEVRKLLENMCSIGLKPDVVTYSILIDGYSKNGRIDDALVVIREMDGVKPSIITFNIMIGVLLKGSRMEEAKDLFDGI

SEQ ID NO: 785 - protein, 403 aa, Triticum aestivum
MSHSFSSSVSSCANELLNELHDHLGFRTLRPELAHQLFDEMLRQPVPVSVRALNDLFVALARAPPSTICTDGPALAIDLFNRMAQAGRRQVIAPTIITYNILIDCCHRACRPDLGHAFFGRLLKTGITMSVITYNSLFMCLCDMRRTKEALNMLLHRMPDDLPNVISYSVILKSFSDSGRSQLALDLLQMMAKKGADHSPDVMSYNIVIDGFFKEGEVSKACDLFQEMIRQGIVPTKVTYISIINALCKARAMDKVEVVLRSMVHNGVQPEAVTYSSMIQGYSTLGQLKEVARLLQVMRSQCCMPNVVTCSSVMDYLCKHGRIKEAEEIFYSMAVNGRKPNVISYSIMLHGYAIEGTLIKMIDLCELMARDGVVPDLRCFNILINAYAKYGMMDVAMLFFEDM

SEQ ID NO: 786 - protein, 403 aa, Triticum aestivum; identical to SEQ ID NO: 785

SEQ ID NO: 787 - protein, 403 aa, Triticum aestivum; identical to SEQ ID NO: 785

SEQ ID NO: 788 - protein, 403 aa, Triticum aestivum; identical to SEQ ID NO: 785

SEQ ID NO: 789 - protein, 403 aa, Triticum aestivum; identical to SEQ ID NO: 785

SEQ ID NO: 790 - protein, 403 aa, Triticum aestivum; identical to SEQ ID NO: 785

SEQ ID NO: 791 - protein, 481 aa, Triticum aestivum
MCKVHAMDKAEEVLQQMLDRRILPDAATYNSLIHGYYLLGQCEEVDRVLKEMCRKSVQPNIVTYYIQMDYLCKSGRCAEARKIFDSMIGLGQKPDVTTYSILLHGYAMEKSFHEMHCLIDLMVENGIAPDHHVYNILISAYAKEERVGEVVHIFTKMRQQGLNPNVANYGVVVNLLCSMGRMDDAMSQYNQMITEGLLPGIILFSQLISGFCTCGKWEKVHELFSEMLDRGIYPDTVFFNTIMDHLCKNGRVMEAQDLFDLMVHMGVKPDVCTYSTLIGGYLFVGKMDEVSKLLDNMVSIGMDPDVITYSILIDGYCKNGRIDDALVVFREMLAGKVKPCIITFNIMIGALLKGGRKEEAKDLFDGIWAKGLVPTVVTYSLMIQKLIEEGSLQESDDLFLSMEKNGCPANSRMLNAIVRRLLQKGEMPRAGTYLSKIDERNFTLEASTTSLLTALASVGKCQEYKGLLPEKYHSFLEQGTD

SEQ ID NO: 792 - protein, 481 aa, Triticum aestivum; identical to SEQ ID NO: 791

SEQ ID NO: 793 - protein, 481 aa, Triticum aestivum; identical to SEQ ID NO: 791

SEQ ID NO: 794 - protein, 481 aa, Triticum aestivum; identical to SEQ ID NO: 791

SEQ ID NO: 795 - protein, 481 aa, Triticum aestivum; identical to SEQ ID NO: 791

SEQ ID NO: 796 - protein, 481 aa, Triticum aestivum; identical to SEQ ID NO: 791

SEQ ID NO: 797 - protein, 482 aa, Triticum aestivum
MSRRFVPVGRRILEQNIKARYHAGDIGTEDALHLFDELLQVAGRSSIHAINCLLTVVCRDCPALGVSLFNRVARSKVAPSSITYAILVDCCCRAGRLDLGHTAMGHIIKTGFAAEAIVNFNHLLKAICAENKTSYAMDIVLRIMPMFNCVPNIFSYSILFKGLCNEKRSQEALELINMMVEDGGSCRPDVVTYNTVIDGLLKEGEVGKAYSLFCEMLRQGVSPDAVTCSSIISGMCKLHAMDKAEEVLQQMLDRRILPNVATYNSLIHGYYLLGQCEEVDRIFKEMSRNGVQPNVVTYNIQMDYLCKSGRCAEARKIFDSMISLGQKPNVYTYSVLLHGYAMEKSFHDMHCLIDLMVENGIAPDHHVYNILISAYAKEEMVGVVMHIFTKMRQQGLNPDAVSYGAVIDLLCSMGRMDDAMSQYNQMITEGLLPGIIVFTPLISGFCSCGKWEKVDELFSEMLDRGICPNSVLQHNYGPPLQK

SEQ ID NO: 798 - protein, 482 aa, Triticum aestivum; identical to SEQ ID NO: 797

SEQ ID NO: 799 - protein, 482 aa, Triticum aestivum; identical to SEQ ID NO: 797

SEQ ID NO: 800 - protein, 482 aa, Triticum aestivum; identical to SEQ ID NO: 797

SEQ ID NO: 801 - protein, 482 aa, Triticum aestivum; identical to SEQ ID NO: 797

SEQ ID NO: 802 - protein, 482 aa, Triticum aestivum; identical to SEQ ID NO: 797

SEQ ID NO: 803 - protein, 490 aa, Triticum aestivum
MSRLHPRYFSSSISSLADELLSELHHHLGSGTLSPQLAHQLFDEMLRQPVPVSSRALNGLFAALARTPPSTTCTDSPALAINLFNRMARAGRGRVIAPSSHTYSILIECCCLARRPDLGPSFFAHLLKTGVTADVVIFSGLFKCLCDMKRADEAQDILLHRIPDDLHDAISYSVILKSFCNNGLSQRALDLLRMMAKKGADHSPGVFAYSMVIHGFFKEGEVSKACDLFHEMIQQGPVPNVVTYNSVIDALCKARAMDKAEVVLRSMVHNGVQPNVVTYNSLIQGYSTVGQLKEVARLLKVMRSQGVMPSVVTYNSLMGYLCKHGRIKEAEEIFFSMTLNGRKPDIVSYSIMLRGYAIEGSLVKMIDLCELMARDGVVPELHCFNILISAYAKYGMMDVAMLFFEDMLKQGLNPGDFIYLTVISAFCKMGRMDDALEKFNEMIDRGVPLDTKIYMCMIEGYLNRGDSVKAEEFITKMKSRDIRHRPRKGN

SEQ ID NO: 804 - protein, 490 aa, Triticum aestivum; identical to SEQ ID NO: 803

SEQ ID NO: 805 - protein, 490 aa, Triticum aestivum; identical to SEQ ID NO: 803

SEQ ID NO: 806 - protein, 490 aa, Triticum aestivum; identical to SEQ ID NO: 803

SEQ ID NO: 807 - protein, 490 aa, Triticum aestivum; identical to SEQ ID NO: 803

SEQ ID NO: 808 - protein, 490 aa, Triticum aestivum; identical to SEQ ID NO: 803

SEQ ID NO: 809 - protein, 296 aa, Triticum aestivum
MAKKGADHSPNVVSYNTVINGFFKEGEVSKACNLFHEMIQQGVVPNEVTYSSIINALCKARAMDKAEVILRHMVHSGVQPHDRIYNILIHGFLTSGQLKEAFRLLKLMTSQGVMPNLVTCNSVMTYHCKNGRVKEAAEIFYSMAVKGRKPNVISYSIMLHGYATEGSLVEMIDLCELMARDGVVPDRSVFNILIKAYAKHGMIDVAMLFFDEMLKQGVNPNDITYLTLISAFCKMGRMDDAMIKFNEMIDMGIPHDTTVYMCMIEGYLNHGDSVKAKEFITKMKSRDVCHSPRKGN

SEQ ID NO: 810 - protein, 296 aa, Triticum aestivum; identical to SEQ ID NO: 809

SEQ ID NO: 811 - protein, 296 aa, Triticum aestivum; identical to SEQ ID NO: 809

SEQ ID NO: 812 - protein, 296 aa, Triticum aestivum; identical to SEQ ID NO: 809

SEQ ID NO: 813 - protein, 259 aa, Triticum aestivum
MIQQGVVPNEVTYSSIINALCKARAMDKAEVILRHMVHSGVQPHDRIYNILIHGFLTSGQLKEAFRLLKLMTSQGVMPNLVTCNSVMTYHCKNGRVKEAAEIFYSMAVKGRKPNVISCSIMLHGYATEGSLVEMIDLCELMARDGVVPDRSVFNILIKAYAKHGMIDVAMLFFDEMLKQGVNPNDITYLTLISAFCKMGRMDDAMIKFNEMIDMGIPHDTTVYMCMIEGYLNHGDSVKAKEFITKMKSRDVCHSPRKGN

SEQ ID NO: 814 - protein, 211 aa, Triticum aestivum
MSRLHPRYFSSSIPSLADELLSELHHHLGSGTLSPQLAHQLFDEMLRQPVPVSSRALNGLFAALARTPPSTTCTDSPALAINLFNRMARAGRGRVIAPSSHTYSILIECCCLARRPDLGPSFFAHLLKTGVTVDVVTFSGLFKCLCDMKRTEEALDVLLHKVPHNLPNVISYSVVVKSFCDNGRSQLALDLLRIMAKKGADHPPTWCHTTR

SEQ ID NO: 815 - protein, 490 aa, Triticum aestivum
MSRLHPRYFSSSIPSLADELLSELHHHLGSGTLSPQLAHQLFDEMLRQPVPVSSRALNGLFAALARTPPSTTCTDSPALAINLFNRMARAGRGRVIAPSSHTYSILIECCCLARRPDLGPSFFAHLLKTGVTVDVVTFSGLFKCLCDMKRTEEALDVLLHKVPHNLPNVISYSVVVKSFCDNGRSQLALDLLRIMAKKGADHSPNVVSYNTVINGFFKEGEVSKACNLFHEMIQQGVVPNEVTYSSIINALCKARAMDKAEVILRHMVHSGVQPHDRIYNILIHGFLTSGQLKEAFRLLKLMTSQGVMPNVVTCNSVMTYHCKNGRVKEAAEIFYSMAVKGRKPNVISYSIMLHGYATEGSLVEMIDLCELMARDGVVPDRSVFNILIKAYAEHGMIDVAMLFFDEMLKQGVNPNDITYLTLISAFCKMGRMDDAMIKFNEMIDMGIPHDTTVYMCMIEGYLNHGDSVKAKEFITKMKSRDVCHSPRKGN

SEQ ID NO: 816 - protein, 296 aa, Triticum aestivum; identical to SEQ ID NO: 809

SEQ ID NO: 817 - protein, 493 aa, Triticum aestivum
MSRLQPRYFSSSVSSRANELLSEFHHHLGSGTLWPELARQLFDQMLRQPVPVSVRALNGLFAALARAPPSTACTNAPALVIDLFNRMAQAGRRQVTAPTIYTYSILIECCHRACRPDLGLAFFGRLLQTGITTDVITYSSLLKCLCDMKRTEEALGVLLHRMPNDLPNVISYSVILKSFCDSGRSQLALDLLRMMAEKGSDHSPSVVSYSVVIDGFFKEGEISKACDLFHEMMQQGVVPDVVMYTSIINALCKARAMDKAEVVLRSMVHNGVQPDAVTYTSLIQGYSTLGQLKEVARLLKVMRSQGVMPDVVTCTLVMDYLCKHGRTKEAQEIFYSMAVNGQKPDIVAYCTMLYGYSIEGSLVDMIDLCELMARDGVVPNLRCFNILINAYAKHGMMDVALLFFEDMLKQGVKPNEFTYLTVISAFCKMGRMDDAMEKFREMIDMGVPVDTEVYMCMIEGYLNHGDSVKAKELITEMKNTDIRHKPWKGNGRT

SEQ ID NO: 818 - protein, 493 aa, Triticum aestivum; identical to SEQ ID NO: 817

SEQ ID NO: 819 - protein, 493 aa, Triticum aestivum; identical to SEQ ID NO: 817

SEQ ID NO: 820 - protein, 493 aa, Triticum aestivum; identical to SEQ ID NO: 817

SEQ ID NO: 821 - protein, 493 aa, Triticum aestivum; identical to SEQ ID NO: 817

SEQ ID NO: 822 - protein, 493 aa, Triticum aestivum; identical to SEQ ID NO: 817

SEQ ID NO: 823 - protein, 378 aa, Triticum aestivum
MPPRSWPAFFGRLLKTGITKDVVTYSSLFKCLCDMKRTEEALNVLLHKMPDDLPNVISYSVILKSFCDSGRSQLALDLLRMMAEKGSGHSPSVVSYSMVIDGFFKEGEISKACDLFHEMIQHGVVPTVVTYNSIIDARCKARAMDKAEVVLRSMVHNGVQPDAVTYNCLIQGYSTLGQLKEVARLLKVMRSQGVLPDVVTYNSLMTCLCKNGRLKEAVVFFYSMAMNGQKPDVISYSVLLHGYAKEGSLIDMIDLCERMARDGVVPNLHCFNILISAYAKYGRMDVAMLFFEDMLKKGLNPNEFIYLTVISAFCKMGRMDDALEKFNEMIDRGVPLDIKIYMCMIEGYLNHGDSVKAEEFITKMKSRDIHHRPRKGNC

SEQ ID NO: 824 - protein, 378 aa, Triticum aestivum; identical to SEQ ID NO: 823

SEQ ID NO: 825 - protein, 378 aa, Triticum aestivum
MPPRSWPAFFGRLLKTGITKDVVTYSSLFKCLCDMKRTEEALNVLLHKMPDDLPNVISYSVILKSFCDSGRSQLVLDLLRMMAEKGSGHSPSVVSYSMVIDGFFKEGEISKACDLFHEMIQHGVVPTVVTYNSIIDARCKARAMDKAEVVLRSMVHNGVQPDAVTYNCLIQGYSTLGQLKEVARLLKVMRSQGVLPDVVTYNSLMTCLCKNGRLKEAVVFFYSMAVNGQKPDVISYSVLLHGYAKEGSLIDMIDLCERMARDGVVPNLHCFNILISAYAKYGRMDVAMLFFEDMLKKGLNPNEFIYLTVISAFCKMGRMDDALEKFNEMIDRGVPLGIKIYICMIEGYLNHGDSVKAEEFITKMKSRGIRHRPRKGNC

SEQ ID NO: 826 - protein, 491 aa, Triticum aestivum
MSRLQVRSLSSSFSSRAYELLNELDGRLGSGTLSPEPARELFDEMLRQPVPVSVRALNGLFAALSRAPPSTIYTNAPALAIDLFNRMAQAGRRQVTAPDIYTYNILIDCCHRACRPDLGPAFFGRLLKTGITKDVVTYSSLFKCLCDMKRTEEALNVLLHKMPDDLPDAISYSVILKSFCDSGRSQLALDLLRMMTEKGSGHSPSVVSYSMVIDGFFKEGEISKACDLFHDMIQHGVVPTVVTYNSIIDARCKARAMDKAEVVLRSMVHNGVQPDAVTYNCLIQGYSTLGQLKEVARLLKVMRSQGVLPDVVTYNSLMTCLCKNGRFKEAVEIFYSMAVNGQKPDVISYSVLLHGYAKEGSLVDMIDLCERMARDGVVPNLHCFNILISAYAKYGRMDVAMLFFEDMLKKGLNPNEFIYLTVISAFCKMGRMDDALEKFNEMIDRGVPLDIKIYMCMIEGYLNHGDSVKAEEFITKMKSRDIRHRPRKGNC

SEQ ID NO: 827 - protein, 378 aa, Triticum aestivum; identical to SEQ ID NO: 823

SEQ ID NO: 828 - protein, 378 aa, Triticum aestivum; identical to SEQ ID NO: 823

SEQ ID NO: 829 - protein, 378 aa, Triticum aestivum; identical to SEQ ID NO: 825

SEQ ID NO: 830 - protein, 490 aa, Triticum aestivum
MSRLQVRSYSSPVSSRANDLLTELHGHMGFGTLRPELAHQLFDEMLGQPVPVSVRALNGLFAALARAPPSTACTDGPALAVDLFNHMARAGRRWMTAPTIHTYNILIDCCHRACRPDLGPAFFGCLLKTGVTTSPITYSSLFKCLCDMKRTEEALDILLHRIADDLPNVISYSVILKSFCDNGRSQLALDLLRVMAKKGGDRSPDVMLYNMVIDGFFKEGEVSKACDLFHEMIQQGVVPTEVTYSSIINALCKARAMDKAEVVLRHMVHNGVQPDVVTYTSLIKGYSTLGQLKEVARLLKVMRSQGVMPGIVTYTLVMDYLCKHGRIKEAEEIFYSMAVNGQKRDTVSYSIMLHGYAIEGSLVQMIDLCELMARDGVVPDLRCFNILINAYAKYGMMDAAMLFFEDMLKQGVKPNEFTYLTVISAFCKMGRMDDAMEKFNEMIDMGVPLDTEVYMCMVEGYFNLDDSIKAKEFITKLKNRDIHHRPRKGN

SEQ ID NO: 831 - protein, 490 aa, Triticum aestivum; identical to SEQ ID NO: 830

SEQ ID NO: 832 - protein, 490 aa, Triticum aestivum; identical to SEQ ID NO: 830

SEQ ID NO: 833 - protein, 490 aa, Triticum aestivum; identical to SEQ ID NO: 830

SEQ ID NO: 834 - protein, 490 aa, Triticum aestivum; identical to SEQ ID NO: 830

SEQ ID NO: 835 - protein, 490 aa, Triticum aestivum
MSRLQVRSYSSPVSSRANDLLTELHGHMGFGTLRPELAHQLFDEMLGQPVPVSVRALNGLFAALARAPPSTACTDGPALAVDLFNHMARAGRRWMTAPTIHTYNILIDCCHRACRPDLGPAFFGCLLKTGVTTSPITYSSLFKCLCDMKRTEEALDILLHRIADDLPNVISYSVILKSFCDSGRSQLALDLLRVMAKKGGDRSPNVMSYNMVIDGFFKEGEVSKACDLFHEMIQQGVVPTEVTYSSIINALCKARAMDKAEVVLRHMVHNGVQPDVVTYTSLIKGYSTLGQLKEVARLLKVMRSQGVMPDIVTYTLVMDYLCKHGRIKEAEEIFYSMAVNGQKRDTVSYSIMFHGYAIEGSLVQMIDLCELMARDGVVPDLRCFNILINAYAKYGMMDAAMLFFEDMLKQGVKPNEFTYLTVISAFCKMGRMDDAMEKFNEMIDMGVPLDTEVYMCMVEGYFNLDDSIKAKEFITKLKNRDIHHRPRKGN

SEQ ID NO: 836 - protein, 234 aa, Triticum aestivum
MDKAEVVLRSMVHNGAQPDAVTYNSLIQGYSTLGQLKEVARLLKVMRSQGVMPSVVTCNSLMTCLCKNGRFKEAVEFFYSMAVNGQKPDVISYSVLLHGYAKEGSLIDMIDLCERMARDGVVPDLHCFNILISAYAKYGRMDVAMLFFEDMLKKGLNPNEFIYLTVISAFCKMDRMDDALEKFNEMIDRGVPLDTKIYMCMIEGYLNHGDSVKAEEFITKMKSRDIRHRPWKGN

SEQ ID NO: 837 - protein, 404 aa, Triticum aestivum
MARAGRRQATAPTIYTYSILMECCHRACRPDLGLAFFGRLLKTGIPTNIIDYSSLFKCLCDMKRTEEALNVLLHKMPDDLPNVISYSVILKSFCDNGRSQLALDLLQMMAKKGADHSPDVMSYNMVIDGFFKEGEVSKACDLFQEMIRQGIVPTEVTYSSIINALCKARAMDKAEVVLRSMVHNGAQPDAVTYNSLIQGYSTLGQLKEVARLLKVMRSQGVMPSVVTCNSLMTCLCKNGRFKEAVEFFYSMAVNGQKPDVISYSVLLHGYAKEGSLIDMIDLCERMARDGVAPDLHCFNILISAYAKYGRMDVAMLFFEDMLKKGLNPNEFIYLTVISVFCKMGRMDDALEKFNEMIDRGVPLDTKIYMCMIEGYLNHGDSVKAEEFITKMKSRDIRHRLWKGN

SEQ ID NO: 838 - protein, 267 aa, Triticum aestivum
MSRFQVRSFSSSVSSRAHELLDELHDHLGFRTLRPELAHQLFDEMLRQPVPVSARALSGLFAALARAPPSPACTDSPALAIDLFNRMARAGRRQATAPTIYTYSILMECCHRACRPDLGLAFFGRLLKTGIKMDGITYSSLFKCLCDMKRTEEALNVLFHKMPDDLPNVISYSVILKSLCDNGRSQLALDLLQMMAKKGADHSPDVMSYNMVIDGFFKEGEVSKACDLFQEMIRQGIVPTEVTYSSIINALCKARGQGRGGSSINGS

SEQ ID NO: 839 - protein, 240 aa, Triticum aestivum
MRYAKQEDKAEVVLRSMVHNGAQLDAVTYNSLMQGYSTLGQLKEVARLLKVMRSQGVMPSVVTYNSLMTCLCKNGRFKEAVEFFYSMAVNGQKPDVISYSVLLHGYAKEGSLIDMIDLCERMARDGVVPDLHCFNILISAYAKYGRMGVAMLFFEDMLKKGLNPNEFIYLTVISAFCKMGRMDDALEKFNEMIDRGVPLDTKNYMCMIEGYLNHGDSVKAEEFITKMKSRDIRHRPWKGN

SEQ ID NO: 840 - protein, 267 aa, Triticum aestivum
MSRFQVRSFSSSVSSRAHELLDELHDHLGFRTLRPELAHQLFDEMLRQPVPVSARALSGLFAALARAPPSPACTDSPALAIDLFNRMARAGRRQATAPTIYTYSILMECCHRACRPDLGLAFFGRLLKTGIKMDVITYSSLFKCLCDMKRTEEALNVLFHKMPDDLPNVISYSVILKSLCDNGRSQLALDLLQMMAKKGADHSPDVMSYNMVIDGFFKEGEVSKAWDLFQEMIRQGIVPTEVTYSSIINALCKARGQGRGGSSINGS

SEQ ID NO: 841 - protein, 404 aa, Triticum aestivum
MARAGRRQATAPTIYTYSILMECCHRACRPDLGLAFFGRLLKTGIPTNIIDYSSLFKCLCDMKRTEEALNVLLHKMPDDLPNVISYSVILKSFCDNGRSQLALDLLQMMAKKGADHSPDVMSYNMVIDGFFKEGEVSKACDLFQEMIRQGIVPTEVTYSSIINALCKARAMDKAEVVLRSMVHNGAQPDAVTYNSLIQGYSTLGQLKEVARLLKVMRSQGVMPSVVTCNSLMTCLCKNGRFKEAVEFFYSMAVNGQKPDVISYSVLLHGYAKEGSLIDMIDLCERMARDGVVPDLHCFNILISAYAKYGRMDVAMLFFEDMLKKGLNPNEFIYLTVISAFCKMGRMDDALEKFNEMIDRGVPLDTKIYMCMIEGYLNHGDSVKAEEFITKMKSRDIRHRPWKGN

SEQ ID NO: 842 - protein, 490 aa, Triticum aestivum
MSQFQVRSFSSSVSSRAHELLDELHDHLGFRTLRPELAHQLFDEMLCQPVPVSARALSGLFAALARAPPSPACTDSPALAIDLFNRMARAGRRQATAPTIYTYSILMECCHRACRPDLGLAFFGRLLKTGIKTDVITYSSLFKCLCDMKRTEEALNVLFHKMPDDLPNVISYSVILKSFCDNGRSQLALDLLQMMAKKGADHSPDVMSYNMVIDGFFKEGEVSKACDLFQEMIRQGIVPTEVTYSSIINALCKARAMDKAEVVLRSMVHNGAQPDAVTYNSLIQGYSTLGQLKEVARLLKVMRSQGVMPSVVTCNSLMTCLCKNGRFKEAVEFFYSMAVNGQKPDVISYSVLLHGYAKEGSLIDMIDLCERMARDGVVPDLHCFNVLISAYAKYGRMDVAMLFFEDMLKKGLNPNEFIYLTVISAFCKMGRMDDALEKFNEMIDRGVPLDTKIYMCMIEGYLNHGDSVKAEEFITKMKSRDIRHRPWKGN

SEQ ID NO: 843 - protein, 267 aa, Triticum aestivum; identical to SEQ ID NO: 838

SEQ ID NO: 844 - protein, 267 aa, Triticum aestivum; identical to SEQ ID NO: 838

SEQ ID NO: 845 - protein, 240 aa, Triticum aestivum; identical to SEQ ID NO: 839

SEQ ID NO: 846 - protein, 267 aa, Triticum aestivum; identical to SEQ ID NO: 838

SEQ ID NO: 847 - protein, 267 aa, Triticum aestivum; identical to SEQ ID NO: 840

SEQ ID NO: 848 - protein, 260 aa, Triticum aestivum
MSRLQVRSFSSPVSSRANDLLTELHAHLGFGTLRPELAHQLFDEMLRQPVPVSARALSGLFAALARAPPSTACTDGPALAIDLFNHMARAGRRWMTAPTIHTYNILIDCCHRACRPDLGPAFFSRLLKTGITMSVITYSSLFKCLCDMKRTEEALGVLLHRMPDELPDVISYSVILKSFCDSGRSQLALDLLRMMAEKGSDHSPSVVSYSVVIDGFFKEGEISKACDLFHEMMQQGVVPDVVMYTSIINALCKARAMDKA

SEQ ID NO: 849 - protein, 490 aa, Triticum aestivum
MSRLQVRSFSSPISSRANDLLTELHGHLGFGTLRPELAHQLFDEMLRQPVPVSARALNGLFAALARAPPSTACTDGPALAVDLFNHMARAGRRWMTAPTIHTYNILIDCCHRACRPDLGPAFFSRLLKIGITMSVITYSSLFKCLCDMKRTEEALGVLLHRMPDDLPDVISYSVILKSFCDSGRSQLALDLLRMMAEKGSDHSPSVVSYSVVIDGFFKEGEISKACDLFHEMMQQGVVPDVVMYTSIINALCKARAMDKAEVVLRSMVHNGVQPDAVTYNSLIQGYSTLGQLKELARLLKVMRSQGVMPSVVTYNSLMTCLCKNGRFKEAVEIFYLMAMKGQKPDLISYSILLHGYAKEGSLIDMIDLCEQMARDGVVPDLHCFNILISAYAKYGRMDVAMLFFEDMLKKGLNPNEIIYLTVISAFCKMGRMDDALEKFNEMIDRGVLLDTKIYMCMIEGYLNHGDSVKAEEFITKMKSRDIRHRPRKGN

SEQ ID NO: 850 - protein, 484 aa, Triticum aestivum
MSRLQPRSFSSPVSSRVSELLDEFKCHLGSGTLWPELAHQLFDEMLRQPVPVSARALGGLFSALARARPSTACTDGPALAIDLFNRHRIAPDIYTYNILIDCCHRACRPDLGPAFFGCLLKTGITTDVITYSSLLQCFCDMKRTEEALDLLLHIVSDNLPDAISYSVILKSFCDNGRSQCALDLLQMMAKKGADHSPNVVSYNLVINGFFKEGEISKACDLFHEMIQQGFVPDVVTYNSVINALCKARAMDKAEVVLRSMVHNSVQPDVVTYNSLIQGFLTTGQLKEAFRLLKVMRSQGVMPSVVTCTSVMDYLCKHGRIKEAEETFYSMAASGRKPDTVSYSIMLLGYAIEGSLVKMIDLCEMMARDGVVPDLRCFNILIKAYAKYGRMDVAMLFFEDMLKQGVKPNEFTYLTVISAFCKMGRMDDAMEKFNEMIDMGVSLDTEVYMCMVEGYFNHGDSMKAEEFITKMKNRDIHHKPWKGNR

SEQ ID NO: 851 - protein, 484 aa, Triticum aestivum
MSRLQPRSFSSPVSSRVSELLDEFKYHLGSGTLWPELAHQLFDEMLRQPVPVSARALGGLFSALARARPSTACTDGPALAIDLFNRHRIAPDIYTYNILINCCHRACRPDLGPAFFGCLLKTGITTDVITYSSLLQCFCDMKRTEEALDLLLHRVSDNLPDAISYSVILKSFCDNGRSQCALDLLQMMAKKGADHSPNVVSYNLVINGFFKEGEISKACDLFHEMIQQGFVPDVVTYNSVINALCKARAMDKAEVVLRSMVHNSVQPDVVTYNSLIQGFLTTGQLKEAFRLLKVMRSQGVMPSVVTCTSVMDYLCKHGRIKEAEETFYSMAVSGRKPDTVSYSIMLLGYAIEGSLVKMIDLCEMMARDGVVPDLRCFNILIKAYAKYGRMDVAMLFFEDMLKQGVKPNGFTYLIVISAFCKMGRMDDAMEKFNEMIDMGVPLDTEVYMCMVEGYFNHGDSMKAEEFITKMKNRDIHHKPWKGNR

SEQ ID NO: 852 - protein, 484 aa, Triticum aestivum; identical to SEQ ID NO: 851

SEQ ID NO: 853 - protein, 484 aa, Triticum aestivum
MSRLQPRSFSSPVSSRVSELLDEFKYHLGSGTLWPELAHQLFDEMLRQPVPVSARALGGLFSALARARPSTACTDGPALAIDLFNRHRIAPDIYTYNILINCCHRACRPDLGPAFFGCLLKTGITTDVITYSSLLQCFCDMKRTEEALDLLLHRVSDNLPDAISYSVILKSFCDNGRSQCALDLLQMMAKKGADHSPNVVSYNLVINGFFKEGEISKACDLFHEMIQQGFVPDVVTYNSVINAPCKARAMDKAEVVLRSMVHNSVQPDVVTYNSLIQGFLTTGQLKEAFRLLKVMRSQGVMPSVVTCTSVMDYLCKHGRIKEAEETFYSMAVSGRKPDTVSYSIMLLGYAIEGSLVKMIDLCEMMARDGVVPDLRCFNILIKAYAKYGRMDVAMLFFEDMLKQGVKPNGFTYLIVISAFCKMGRMDDAMEKFNEMIDMGVPLDTEVYMCMVEGYFNHGDSMKAEEFITKMKNRDIHHKPWKGNR

SEQ ID NO: 854 - protein, 484 aa, Triticum aestivum; identical to SEQ ID NO: 851

SEQ ID NO: 855 - protein, 484 aa, Triticum aestivum; identical to SEQ ID NO: 851

SEQ ID NO: 856 - protein, 484 aa, Triticum aestivum; identical to SEQ ID NO: 851

SEQ ID NO: 857 - protein, 298 aa, Triticum aestivum
MSRRFPPGAMSRRILERKIQDRYRAGHIGTDDALNLFDELIQVAGPSSVRAINCLLTVVGRDCPALGVSLFNRVARAKVPPHNITYGILVDCCCRAGRLDLGHAAMGHVIKLGFTAEAIVNFSHLLKAICAEKKTSYAMDIVLRIMPEFNCVPNIFSYNILFKGLCNERRSQEAVELINIMVEDGRGCCRPDVVTYNTVIDGLLKEGEVGKAYSLFCEMPQRGISPDDVTWNSIISGMCKVHAMDKAEDVLEQMLDRGILPDVTTYNSLIHGYYSLGQCEEVDRISRKCLEMVFNQIL

SEQ ID NO: 858 - protein, 475 aa, Triticum aestivum
MAVCAEKKTSYGMDIVLRIMPELNCIPDVYSYSILFKGLCNEKRSQEALELIHMMVEHGGSCQPNLVSYNTVIDGLLKEGEVGKAYSLFCEMVQRGISPNIVTYNSIISGMCKVHATDKAEKVLQQMFDREFLPDTATYTSLIHGYYSSGQCKEVEQVFEHMSINGVQPNMITYNIQMDYHCKSGRCTEARKIFDSMVSLGQKPSVSTYSILLHGYAIEKSFHDMHCLLDLMVENGISPDHHVYNILISAYAKEEMASEVMHIFTKMRQQGLNPSVANYGAVINLLSSIGRMDDAMSQFNQMIAEGLAPDIIVFNPLISGFCTCGKWEKVHELFSEMLNRGIYPDTVFFTTIMDRLCKNGRVMEAQDMFDLMVHMGVKPNVHAYATLMHGYFFVRKMDEVRKLLGNMLSIGLKPDVFIYTILIDGYSKNGMIDNASAVFTEMLEKNIKPSAITYSTMLYGLFHAGLLLPLNYISG

SEQ ID NO: 859 - protein, 357 aa, Triticum aestivum
MDCSCRAHRLDLAFAFFGRLLRTGLKAGVIEVNSLLKGLCHAKRADEAMEVLLHRMPELFIGVQGTAVYRSLIQGFCTHGDLVKAKEYVTEMMKKGMPPPDIMFFSSIMQNLCTEGRVIEARDILDLIVRIGMRPDVFIFNILIGGYCLVGKMEDASKIFDDMVSYGLEPCNFTYGILINGYCKNKRIDDGLILFKEMLRKGLKPTTFNYNVILDGLFLAGQTVAAKEKFDEMVESGVSVCIDTYSIVLGGLCRNSCSSEAITLFRKLSAMNVKFNITIVNTIIGAFYRVERNQEAKDLFAAIPASGLVPNVLTYTIMIKNLIKEGSVEEANNLFLSMEKSGCSANSYLLNHIIRRC

SEQ ID NO: 860 - protein, 446 aa, Triticum aestivum
MLRQPVPISARALNGLFVALARAPPSTACTNASALAIDLFNRMAQAGRRQVTAPTIYTYNILIDCCHRACCPDLGPAFFGRRLKTGIPTDIITYSNLFKCLCDMKRTEEALGVLLHRMPDDLPDVISYSVILKSLCDNGRCQLALDLLRMIAEKGSDHSPSVVSYSMVIDGFFKEGEISKACDLFHEMMQQGVVPDVVTYSSVIDALCKARAMDKAEVVLRSMVHNGVQPDAVTYNCLIQGYSTLGQLKEVARLLKVMRSQGVMPSVVTYTSLMDYLCKHGRIKEAEEIFYSMAVNGRKPDIVSYSIMLRGYAIEGSLIDMIHLCELMARNGVVPDLYCFNILINACAKHGMMDVALLFFEDMLKQGVKPNEFTYLTVISAFCKMGRMDDAMEKFREMIDMGVPVDTEVYMCMVEGYFKNGDSVKAKDFITKMKNKDISNRPQKGN

SEQ ID NO: 861 - protein, 446 aa, Triticum aestivum; identical to SEQ ID NO: 860

SEQ ID NO: 862 - protein, 446 aa, Triticum aestivum; identical to SEQ ID NO: 860

SEQ ID NO: 863 - protein, 446 aa, Triticum aestivum; identical to SEQ ID NO: 860

SEQ ID NO: 864 - protein, 446 aa, Triticum aestivum; identical to SEQ ID NO: 860

SEQ ID NO: 865 - protein, 446 aa, Triticum aestivum; identical to SEQ ID NO: 860

SEQ ID NO: 866 - protein, 477 aa, Triticum aestivum
MSRLQPRSSRANELLDEFKYHLGSGTLWPELAHQLFDELLRQPVPVSARALNGLFAALADAPPSANCADGPALAINLFNRHRISPNIYTYNILIECCHRACRPDLGPAFFGRLLKAGITMSVITYNSLFKCLCDMKRTEEASDVLLHRMPDDLPDVISYSVILKSFCDSGRSQRALDLLRVMAKKGGDYSPNVISYNMVMDGFFKEGEVSKARVLFHEMIQQGVVPTEVTYSSIINALCKARAMDKAEVILRHMVRSGVQPHDRIYNTLIHGFLTSGQLKEAFRLLKLMTSQGVMPSVVTYNSLMTYLCKNGRFKEAVELFYSMAVKGQKPSVVSYSIILHGYAIEGSLVKMIDLCELMARDGVVPNLHCFNILINAYAKYGMMDVAMLFFEDMLKQGVKPNEFTYLTVISAFCKMGRMDDAMEKFSEMINMGVPLDTEVYMCMVEGYLNLGNSMKAKEFITKMKNRDIHHRPRKGN

SEQ ID NO: 867 - protein, 477 aa, Triticum aestivum; identical to SEQ ID NO: 866

SEQ ID NO: 868 - protein, 477 aa, Triticum aestivum; identical to SEQ ID NO: 866

SEQ ID NO: 869 - protein, 477 aa, Triticum aestivum; identical to SEQ ID NO: 866

SEQ ID NO: 870 - protein, 477 aa, Triticum aestivum; identical to SEQ ID NO: 866

SEQ ID NO: 871 - protein, 477 aa, Triticum aestivum; identical to SEQ ID NO: 866

SEQ ID NO: 872 - protein, 404 aa, Triticum aestivum
MARAGRHWMTAPTIHTYNILIDCCHRACRPDLGPAFFSRLLKTGITMSVITYSSLFKCLCDMKRTEEALGVLLHRMPDDLPDVISYSVILKSFCDSGRSQLALDLLRMMAEKGSDHSPSVVSYSVVIDGFFKEGEISKACDLFHEMMQQGVVPDVVMYTSIINALCKARAMDKAEVVLRSMVHNGAQPDAVTYNSLIQGYSTLGQLKDVVRLLKVMRSQGVMPSVVTYTSLMDCLCKHGRIKEAEEIFYSMAVNGQKPDIVSYSIMLRGYAIEGSLVDMIDLCELMARNGVVPDLQFFNIVINAYAKHGMMDVALLFFEDMLKQGVKPNEFTYLTVISAFCKMGRMDDAVEKFREMIDMGVPVDTEVYMCMVEGYFKNGDSVKAKDFITKMKNKDIPNRPQKGN

SEQ ID NO: 873 - protein, 456 aa, Triticum aestivum
MCKVQAMDEAEEVLQQMFDTGILPNITTYNSLIHGYYSSGQCEQVAHIFKKMSRNGVQPDIATYTIQMDYLCKSRRFAGARTIFDSMAGKDQKPNVTSYSILLHAYAMEQSVHDMHCLIELMVENGIAPNHSVYNILIVAYAKGKMFDEVMHIFTKMRQQGLNPNAASYGTVINLLCSIGRMDDAMLQFNQMITEELAPDIIVFNTLISGFCSCGKWEKVHELLAEMLNRGIYPDNVFFNTIMDHLCKNGRVMESQDLADLMIHMGLKPDMHTYNTLMGGYFFIGKMDEVRKLLDHMVSIGMEPDVVTYNTLIDGYFKNGMIDDALAIFSEMLDKKVKPCVITYNTVLHGLFHTGRTVAANELYLRMIDSGICVDIVTYNIILSGLCRNNCVDEALRMFQNLCSTNYQLEIRTYNIMISALLKVGRKEEATGLLDGISAKGFVLDAVTYRLMIQSF

SEQ ID NO: 874 - protein, 275 aa, Triticum aestivum
MDDAMLQFNQMITEELAPDIIVFNTLISGFCSCGKWEKVHELLAEMLNRGIYPDNVFFNTIMDHLCKNGRVMESQDLADLMIHMGLKPDVHTYNTLMGGYFFIGKMDEVRKLLDHMVSIGMELDVVTYNTLIDGYFKNGMIDDALAVFSEMLDKKVKPCAITYNTVLHGLFHTGRTVAANELYLRMIDSGICVDIVTYNIILSGLCRNNCVDEALRMFQNLCSTNYQLETRTYNIMISALLKVGRKEEATGLLDGISAKGFVPDAVTYRLMIQSF

SEQ ID NO: 875 - protein, 275 aa, Triticum aestivum; identical to SEQ ID NO: 874

SEQ ID NO: 876 - protein, 305 aa, Triticum aestivum
MFDTGILPNITTYNSLIHGYYSSGQCEEVAHIFKKMSRNGVQPDIATYTIQMDYLSKSRRFAEARTIFDSMAGKDQKPNVTSYSILLHAYAMEQSVHDMHCLIELMVENGIAPNHSVYNILIVAYAKGKMFDEVMHIFTKMRQQGLNPNAASYGTVINLLCSIGRMDDAMLQFNQMITEELAPDIIVFNTLISGFCSCGKWEKVHELLAEMLNRGIYPDNVFFNTIMDHLCKNGRVMESQDLADLMIHMGLKPDMHTYNTLMGGYFFIGKMDEVRKLLDHMVSIGMEPDVVTYNTLIDGYFKNGM

SEQ ID NO: 877 - protein, 275 aa, Triticum aestivum; identical to SEQ ID NO: 874

SEQ ID NO: 878 - protein, 456 aa, Triticum aestivum; identical to SEQ ID NO: 873

SEQ ID NO: 879 - protein, 275 aa, Triticum aestivum; identical to SEQ ID NO: 874

SEQ ID NO: 880 - protein, 230 aa, Triticum aestivum
MLNRGIYPDNVFFNTIMDHLCKNGRVMESQDLADLMIHMGLKPDMHTYNTLMGGYFFIGKMDEVRKLLDHMVSIGMEPDVVTYNTLIDGYFKNGMIDDALAIFSEMLDKKVKPCVITYNTVLHGLFHTGRTVAANELYLRMIDSGICVDIVTYNIILSGLCRNNCVDEALRMFQNLCSTNYQLEIRTYNIMISALLKVGRKEEATGLLDGISAKGFVLDAVTYRLMIQSF

SEQ ID NO: 881 - protein, 456 aa, Triticum aestivum; identical to SEQ ID NO: 873

SEQ ID NO: 882 - protein, 456 aa, Triticum aestivum; identical to SEQ ID NO: 873

SEQ ID NO: 883 - protein, 275 aa, Triticum aestivum; identical to SEQ ID NO: 874

SEQ ID NO: 884 - protein, 456 aa, Triticum aestivum; identical to SEQ ID NO: 873

SEQ ID NO: 885 - protein, 204 aa, Triticum aestivum
MCKVQAMDKAEEVLQQMFDTGILPNITTYNSLIHGYYSSGQCEEVAHIFKKMSRNGVQPDIATYTIQMDYLSKSRRFAEARTIFDSMAGKDQKPNVTSYSILLHAYAMEQSVHDMHCLIELMVENGIAPNHSVYNILIVAYAKGKMFDEVMHIFTKMRQQGLNPNAASYGTVINLLCSIGRMDDAMLQFNQMITEELAPDSASF

SEQ ID NO: 886 - protein, 275 aa, Triticum aestivum; identical to SEQ ID NO: 874

SEQ ID NO: 887 - protein, 359 aa, Triticum aestivum
MPTARLSSLSTSSFKAPSRERRAPLAALAAATERVREGTLSRQDAHHLFDELLGQAAAVPERGLNNFLAALARAPPSSACSDGPGLAIALFNRMSQGAGARVVSPTLCTYSILMDCCCRAGRPDLVVAFFGRLIRLGLRLEVISFSNLLKGLCKAKRSNEALDLLLHRMPELDCAPDVFSYSIVINGCFKEGEVDKACNLFHEMIQLGVQPNVAIYTSIIDALSKCGAMDKAEVVLRQMVDQGIGPNIRTYTSLIHGYSASGQWKEAVRLFKKMIRLGALPDTVMWNSFMDSLCKHRRTKDARDIFDSMAAKGQKPDIFSYSTMLNGYAKEGCFDDMTCLFNSMLQNGILPDHRVFNID

SEQ ID NO: 888 - protein, 359 aa, Triticum aestivum; identical to SEQ ID NO: 887

SEQ ID NO: 889 - protein, 359 aa, Triticum aestivum; identical to SEQ ID NO: 887

SEQ ID NO: 890 - protein, 359 aa, Triticum aestivum; identical to SEQ ID NO: 887

SEQ ID NO: 891 - protein, 359 aa, Triticum aestivum; identical to SEQ ID NO: 887

SEQ ID NO: 892 - protein, 359 aa, Triticum aestivum; identical to SEQ ID NO: 887

SEQ ID NO: 893 - protein, 447 aa, Triticum aestivum
MLRQPVTVSVRALNGLFAALARAPPSTICTDALALAIDLFNRMAQAGRRQVPAPTIITYNILIGCCHRACRPDLGPAFFGRLLKAGIKTDVITYSSLFKCLCDMKRTEEALNMLFHKMPEDLPNVISYSVILKSFCDNGRSQLALDLLQMMAKKGADHSPDVMSYNMVIDGFFKEGEVSKACDLFQEMIRQGIVPTEVTYSSIINALCKARAMDKAEVVLRSMVHNGAQPDAVTYNSLIQGYSTLGQLKEVARLLKVTRSQGVMPSVVTYNSLMDYLCKHGRIKEAEEIFYSMAVNGRRPDIVSYSIMLHGYAIEGSLVKMIDLCELMARDGVVPDLRCFNILINAYAKYGRMDVAMLFFEDMLKQGVKPNEFTYLTVISAFCKMGRMDDAMEKFSEMIDIGVPLDTEVYMCMVEGYFNHGDSMKAEEFITRMKNRDINHKPWEGNR

SEQ ID NO: 894 - protein, 241 aa, Triticum aestivum
MDRLCKNGRVTEAQDLFDLMVHMGVKPDVCTYNTLMGGYLFVGKMDEVSKLLDNMVSIGMEPDVITYSILIDGYSKNGRIDDALVVFREMLDTKGKPSVISFNIMIGALLKCGRKEEAKDLFDGIWANGLVPDVITYSLMIQKLIEEGSLQESDDLFLSTEKNGCAADSRRLNAIVRSLLQKGEIPRAGTYLSKIDERGFTLEASTASLLTALASGGKGQEYKELLPEKYHSFLEQGTLNF

SEQ ID NO: 895 - protein, 241 aa, Triticum aestivum; identical to SEQ ID NO: 894

SEQ ID NO: 896 - protein, 454 aa, Triticum aestivum
MEQAHPPNSALVISYPRLRRSGLVGGERWRRIITYNIQMDYLCKSGQCAEARKIFDSMISLGQNPTATTYSILLHGYAMEKSFHDMHCLIDLMVENGISPDHYVYNILISAYAKEEMVGEVMHIFTKMRQQGLNPDAVSYGTVIDLLSRIGRMDDAMSLFNQMITEGLAPGTIVFNHLISGFCTCGKWEKVHELFSEMLDRGICPDTVFFNTVMDRLCKNGRVTEAQDLFDLMVHMGVKPDVCTYNTLMGGYLFVGKMDEVSKLLDNMVSIGMEPDVITYSILIDGYSKNGRIDDALVVFREMLDTKGKPSVISFNIMIGALLKCGRKEEAKDLFDGIWANGLVPDVITYSLMIQKLIEEGSLQESDDLFLSTEKNGCAADSRRLNAIVRSLLQKGEIPRAGTYLSKIDERGFTLEASTASLLTALASGGKGQEYKELLPEKYHSFLEQGTLNF

SEQ ID NO: 897 - protein, 241 aa, Triticum aestivum; identical to SEQ ID NO: 894

SEQ ID NO: 898 - protein, 457 aa, Triticum aestivum
MSNIGMPIFGSKPIMLHVPHAPPQLLHHAHVPHRPPPPPPLLLLLLLLLHLHLATLTVTVMVSPRRLCRGHGARPRRDAQPGGRTPPVRPIATAGHSGPRALPGRLPCRPRPCARLSCLQRWPRPRHRPLQPRMPRRSRPAGGAAHSLHLRHPDELLLPRASSGPRACLIWPPPKDRPQNKLDRRQHRPQVPCCAKRTDEAVNVLIHRMSDLGCVPNEFSYNTVLKSLCEDSRSQRALDLLRVMAKGDGCSPCVVSYSTVIYGFFKEGKVGKACNLFHEMTQQGVVSDVVTYNSIIDALCKARAMDKAELFLRQMVDDDIRPNGVTYTAMIHGYSTLGQWKKATQMFREMTSRGLVPDTVTWNSFMASLCKHGRSREAAELLYSMAAKGHKPNVVSYSTLLHGYANEGCFADMVNLFNSMVGKGIVPDHHVFNIFINAYAKCGMMDEVMHMLTEMQE

SEQ ID NO: 899 - protein, 430 aa, Triticum aestivum
MSRNGVQPDIVTYNIQMDYLCKNGGCAEARKFFDSMISLGQKPTVTTYNILLHGYAMERSFHDMNCLIDLMVGNGIAPDHNVYNILISAYAKEETVGEVMHIFTKMRQQGLNPNAASYGTVINLLCRIGRMDDAVLQFTQMITEGLTPDIIVFTPLISGFCACGKLEKVHELFSEMLDRGIYPDTMFFTTVMDRLCKNGRVMEARDIFDLMVHMGVKPDVRSYATLMHGYFLVGKMDEVRKLLDNMCSIGMEPDVVTYSILIDGYSKNGRIDDAFVVFKEMLEGKVKPCVITFTIMIGALLKCGRKEEAKDLFDGIWANGLVPNVITYSLMIQNLIEEGSLQESDDLFLSMEKNGCAADSRMLNAIVRRLLQRGEMPRAGTYLSKIDEGSFTLEASTAGLLTALASGGKCQEYKGLLPEKYHSFLEQGTD

SEQ ID NO: 900 - protein, 430 aa, Triticum aestivum; identical to SEQ ID NO: 899

SEQ ID NO: 901 - protein, 430 aa, Triticum aestivum; identical to SEQ ID NO: 899

SEQ ID NO: 902 - protein, 442 aa, Triticum aestivum
MSGHFVPVDRRILEQNIKARYHAGDIGTEDALHLFDELLQCAGSSSIRAINYLVTTVGRDSPALGVSLFNRVASANVAPNSMTYTILVDCCCRAGRLDLGFAAMGHIIKMGFAADAIVTFSHLLKAICAEKKTSYAMDIVLRIMPMFNCVPDNFSYNILFKGLCNERRSQEALELIHMMVQHGGSCQPNVVSYNTVVDGLLKEGEVGKAYTLFSEMLRQGISPDVVTCTSIISGMCKVHAMDKAEEVLQQMLDRRILPDAATYNCLIHGYYLLGQCEEVDRIFKEMSRNGVQPNIVTYNIQMDYLCKSGRCAEARKIFDSMIGLGQKPVVTTYSILLHGYAMEKSFHDMHCLIDLMVENGIAPNHPVYNILISACAQEEMVSEVMHIFTKMRQQGLNPNVANYGVVVNLLSRIGRMDDAMSLFNQMITEGLAPDIIVFTPPY

SEQ ID NO: 903 - protein, 442 aa, Triticum aestivum; identical to SEQ ID NO: 902

SEQ ID NO: 904 - protein, 442 aa, Triticum aestivum; identical to SEQ ID NO: 902

SEQ ID NO: 905 - protein, 442 aa, Triticum aestivum; identical to SEQ ID NO: 902

SEQ ID NO: 906 - protein, 442 aa, Triticum aestivum; identical to SEQ ID NO: 902

SEQ ID NO: 907 - protein, 442 aa, Triticum aestivum; identical to SEQ ID NO: 902

SEQ ID NO: 908 - protein, 435 aa, Triticum aestivum
MSRLRLLRRSSSSTTLIPLLRLLRRCSTSTSTSPPSRSWSPRDAFVAAIERVRARTLSPEDAHHLFDDLLGQATPVPVRTLNGFFAVLARATSSAACIRDGPALAVALFNRVCQEEAGPRVATPTVHTYGILMDCCCRARRPDLGLALFGRFLGTGLRTNEIVATTFLKCLCCAKRTEEVVKVLLHRMPELGCVPNAISYSIVLKSLCENSMSQQALDLLQMVGKEGGCLRDVVAYNTIIHGFFKECGIDKACHLFHEMMRQGVVPTVVTYNTVIDALCKAGEMDKAELVFQRMARNGAQPNKVTCNGSKFSSLTDGYCSVGKMDKTFKLLDAMVSDGIEPDAVTYSALLDGYFKNGRIDDGLTLFREMSCKGVKPTTVTYGIILDGLYRAGRTAAAKKMFDQMIKSGITVTVSIYTTPSFPVYKAYFNFFVFPI

SEQ ID NO: 909 - protein, 435 aa, Triticum aestivum
MSRLRLLRRSSSSTTLIPLLRLLRRCSTSTSTSPPSRSWSPRDAFVAAIERVRARTLSPEDAHHLFDDLLGQATPVPVRTLNGFFAVLARATSSAACIRDGPALAVALFNRVCQEEAGPRVATPTVHTYGILMDCCCRARRPDLGLALFGRFLGTGLRTNEIVATTFLKCLCCAKRTEEVVKVLLHRMPELGCVPNAISYSIVLKSLCENSMSQQALDLLQMVGKEGGCLRDVVAYNTIIHGFFKECGIDKACHLFHEMMRQGVVPTVVTYNTVIDVLCKAGEMDKAELVFQRMARNGAQPNKVTCNGSKFSSLTDGYCSVGKMDKTFKLLDAMVSAGIEPDAVTYSALLDGYFKNGRIDDGLTLFREMPCKGVKPTTVTYGIILDGLYRAGRTAAAKKMFDQMIKSGITVTVSIYTTPSFPVYKAYFNFFVFPI

SEQ ID NO: 910 - protein, 436 aa, Triticum aestivum
MVDLYNSMSSNGIVPNRQVFNILIDAYAKRGMTDEAMLIFTEMRGQGLSPDVCTYSTLISALSRTGRLADAMDRFSQMISIGIQPDAVVYQALIQGYCTVGDLVKAKVLVSEMMNRGIPPPDIVFFNSIMTSLCKEGRVTDAHSILDFVIHFGVRPSISTFNLLIDGYCLVGKMKKAFGVLDTMASVGIEPDDISYSAIINGCFKNGRIDDGFTIFREMLKKVKPTTVTYNIILGGLFCAGKTVAAMKMFHEMIESGITVSSSTYRTVLGGLCRNSCEDEAITLFQKLGAMNVKLDIAILNTMINAMFKLQRREEANDLFSAVSASGLVPNASTYGVMIKNLLREGSVEKAENMFSLMEKSGCAPDSRLINDIIRILLKKGEIVKAGNYMSKVDGRSISLEASTTSLMIRLFSSEGKYRGQINLLPVKYQFFDGVS

SEQ ID NO: 911 - protein, 365 aa, Triticum aestivum
MDRFSQMISIGIQPDAVVYQALIQGYCTVGDLVKAKVLVSEMMNRGIPPPDIVFFNSIMTSLCKEGRVTDTHSILDFVIHFGVRPSISTFNLLIDGYCLVGKMKKAFGVLDTMASVGIEPDDISYSAIINGCFKNGRIDDGFTIFREMLKKVKPTTVTYNIILGGLFCAGKTVAAMKMFHEMIESGITVSSSTYRTVLGGLCRNSCEDEAITLFQKLGAMNVKLDIAILNTMINAMFKLQRREEANDLFSAVSASGLVPNASTYGVMIKNLLREGSVEKAENMFSLMEKSGCAPDSRLINDIIRILLKKGEIVKAGNYMSKVDGRSISLEASTTSLMIRLFSSEGKYRGQINLLPVKYQFFDGVS

SEQ ID NO: 912 - protein, 365 aa, Triticum aestivum; identical to SEQ ID NO: 911

SEQ ID NO: 913 - protein, 365 aa, Triticum aestivum; identical to SEQ ID NO: 911

SEQ ID NO: 914 - protein, 365 aa, Triticum aestivum; identical to SEQ ID NO: 911

SEQ ID NO: 915 - protein, 436 aa, Triticum aestivum; identical to SEQ ID NO: 910

SEQ ID NO: 916 - protein, 444 aa, Triticum aestivum
MARALPSPSSTACPEALVHGWCRCRAGRPDLVVAFFGRLLRLGLCLNVISLSNLLKGLCQVKRTNEAVDLLLHRTPELDCVPNVFSYSIVINGCFKQGEVDKACNLFHGMIQLGVQPNVVIYTSIIDALSKCGAMDKAEVVFRQMVDKGIGPDVMTCTSLIHGYSISGRWKAAVRVFKEMISLGVVPDTVMWNSFVDSLCKHRRTKEARVIFDSMAAKGQKPDTVSYSIMLNGYVKEGCFDDMTGLFNSMLQNGVVPNHHIFNILINAYAKRGLMDEAMHMFEVMRQQGVNPDVVDYLVVMDSLCKMGRMDAALDKFNQMVNQGVSPNKAVYQCLVLGSCSHGDFVKAKELISEALNRGLCSNSVFFYPVINDLCKEGKVKEAQDMFDFIVGIGQRPDVIMYNSLMDGYCLVGKVEEALRVLDAMKSAGLQPDAIMYGILLNDH

SEQ ID NO: 917 - protein, 444 aa, Triticum aestivum; identical to SEQ ID NO: 916

SEQ ID NO: 918 - protein, 444 aa, Triticum aestivum; identical to SEQ ID NO: 916

SEQ ID NO: 919 - protein, 439 aa, Triticum aestivum
MMSLFNSMEGDGIVANSYVFNILINAYAKGGMMDEAMLILTEMRGQGLSPDVFTYSTLVSAFCRMGRLADAMDKFSQMIGTGVQPNTVVYHSLVQGLCTHGDLVKAKELISEMMNKGMIRPNIAFFNSIMDSLCNEGRVVDAHHIFDLVTDIGEKPDVITFSTLIDGYCLVGEMEKACRVFDAMVSAGIEPDVITYSTLVSGYCKSGRIDDGLILFREMLHKEVKPTTVTYGTVLDGLFRAWRSAAAKKVFHEMIESGIMVSISIYNIILGGLCRNNCADEAIVLFQKLCAMNVKFNITTLNIMLNAFYKVQRRDEASDLFAALPASGLVPNASTYGVMIQNLLKEGAVEEADSMFSSMEKSGCAPSSRFSNCIIRTLLEQGEIVKAGKYMSKVDGKTFLLEASTTSLLMSLFSRGGKYQEHILLLPAKYQFFSGVNHS

SEQ ID NO: 920 - protein, 439 aa, Triticum aestivum
MMSLFNSMEGDGIVANSYVFNILINAYAKGGMMDEAMLILTEMQGQGLSPDVFTYSTLVSAFCRMGRLADAMDKFSQMIGTGVQPNTVVYHSLVQGLCTHGDLVKAKELISEMMNKGMIRPNIAFFNSIMDSLCNEGRVVDAHHIFDLVTDIGEKPDVITFSTLIDGYCLVGEMEKACGVFDAVVSAGIEPDVITYSTLVSGYCKSGRIDDGLILFREMLHKEVKPTTVTYGTVLDGLFRAWRSAAAKKVFHEMIESGIMVSISIYNIILGGLCRNNCADEAIVLFQKLCAMNVKFNITTLNIMLNAFYKVQRRDEASDLLAALPASGLVPNASTYGVMIQNLLKEGAVEEADSMFSSMEKSGCAPSSRFSNCIIRTLLEQGEIVKAGKYMSKVDGKTILLEASTTSLLMSLFSRGGKYQEHILLLPAKYQFFSGVNHS

SEQ ID NO: 921 - protein, 439 aa, Triticum aestivum; identical to SEQ ID NO: 919

SEQ ID NO: 922 - protein, 439 aa, Triticum aestivum; identical to SEQ ID NO: 920

SEQ ID NO: 923 - protein, 384 aa, Triticum aestivum
  SITE 354: note = misc_feature - Xaa can be any naturally occurring amino acid
  SITE 371: note = misc_feature - Xaa can be any naturally occurring amino acid
  SITE 373: note = misc_feature - Xaa can be any naturally occurring amino acid
MMSLFNSMEGDGIVANSYVFNILINAYAKGGMMDEAMLILTEMRGQGLSPDVFTYSTLVSAFCRMGRLADAMDKFSQMIGTGVQPNTVVYHSLVQGLCTHGDLVKAKELISEMMNKGMIRPNIAFFNSIMDSLCNEGRVVDAHHIFDLVTDIGEKPDVITFSTLIDGYCLVGEMEKACRVFDAMVSAGIEPDVITYSTLVSGYCKSGRIDDGLILFREMLHKEVKPTTVTYGTVLDGLFRAWRSAAAKKVFHEMIESGIMVSISIYNIILGGLCRNNCADEAIVLFQKLCAMNVKFNITTLNIMLNAFYKVQRRDEASDLFAALPASGLVPNASTYGVMIQNLLKEGAVEEADXMFSSMEKSGCAPSSRLXNXVSSELYWKRGR

SEQ ID NO: 924 - protein, 439 aa, Triticum aestivum; identical to SEQ ID NO: 919

SEQ ID NO: 925 - protein, 439 aa, Triticum aestivum; identical to SEQ ID NO: 920

SEQ ID NO: 926 - protein, 360 aa, Triticum aestivum
MDCCCRADRPDLVVAFFGRLLRLGLRLNVISFNNLLKGLCQAKRSNEALDLLLHRMPELDCAPDVFSFNIVINGCFREGEVDKACNLFHEMPQLGVQPDVVTYNSIIIALSRAGAMGKAEVVLRQMVDKGIGPDVMTYNSLIHGYSTLGQWKAAVRVFKEMVSVGVLPNAVTLNSFMDSLCKHRRTKEARDIFDSMAAKGHKPNIASYSTMLNGYAKQGCFDDMTGLFNSMVQNGVVPNHHIFNILINAYAKRGLMDEAMHMFEVMRQQGVNPDVFSHQIVMDSLCKMGRMDAALDKFNQMVNQGVSPNKAVYQCLVLGSCSHGHFVKAKELISEAVNRGLCSNSVFFYPVVNDLCKEGR

SEQ ID NO: 927 - protein, 430 aa, Triticum aestivum
MSRNGVQPDIVTYSIQMDYLCKSGRCTEARKIFDSMISLGQKPTVTTYNILLHGYAMERSFYDMNCLIELMDDNGISPDHYGYNILISAYAKEETVGEVMHIFTKMRQQGLNPNVVNYGAVINLLSSIGRMDDAMSQFNQMITEGLAPDIIVFTPLISGFCSCGKWEKVHELFSEMLDRGIYPNTVFFTTVMDRLCKNGRAMEARDIFDLMVHMGVKPDVRSYATLMHGYFLVGKMDEVRKLLDNMCSIGMEPDVVTYSILIDGYSKNGRIDDAFVVFKELLEGKVKPCVITFNIMIGALLKCGGKAEAKDLFDGIWANGLVPDVITYSLMIQKLIEEGSLQESDDLFLSMEKNGCAADSRMLNAIVRRLLQRGEMPRAGTYLSKIDEGSFTLEASTAGLLTALASGGKCQEYKGLLPEKYHSFLEQGTG

SEQ ID NO: 928 - protein, 221 aa, Triticum aestivum
MLRKGLKPTTFNYNVILDGLFLAGRTVAAKEKFDEMVESGVSVCIDTYSIVLGGLCRNNCSGEAITLFQKLSTMDVKFNIIIVNIMIDAFYRVQRNQEAKDLFAAVSANGLVANVFTYTIMMKNLIKEGSVEEADDLFLSMEKSGCTADSYMLNLIVRMLLEKGELVKAGNYMSKVDAKSYSLEAETVSLLISLFSGKGKYREHIGLLPTKYRFREEAATV

SEQ ID NO: 929 - protein, 432 aa, Triticum aestivum
MAIKGLKPDNVSYAIRLHGYATEGCFVDMINLFNSMERDCILPDCRIFSILIYAYAKSGKLDKAMLIFNEMQKQGVSPNAVTYSTVIDAFCKKGRLDDAVIKFNQMIDTGVRPDTAVYSSLIQGFCTRGDLVKAKELLTKMMNKGIPPSDIKFFSSIMQNLCTEGRVTEARDVLGLIAHIGMRPNVCTFNILIGGYCLVGKMEDASKIFDDMMSYGLEPSNITYGILINGYCKNLRIDDGLILFKEMLRKGLKPTTFNYNVILDGLFLAGRTVSAKEKFDEMVESGVSVCIDTYSIVLGGLCRNNCSGEAITLFQKLSTMDVKFNITIVNIMIDAFYRVQRNQEAKDLFAAVSANGLVANVFTYTIMMKNLIKEGSVEEADDLFLSMEKSGCTADSYMLNLIVRMLLEKGELVKAGNYMSKVDAKSYSLEAT

SEQ ID NO: 930 - protein, 432 aa, Triticum aestivum; identical to SEQ ID NO: 929

SEQ ID NO: 931 - protein, 221 aa, Triticum aestivum
MLHKGLKPTTFNYNVILDGLFLAGRTVAAKEKFDEMVESGVSVCIDTYSIVLGGLCRNNCSGEAITLFQKLSTMDVKFNIIIVNIMIDAFYRVQRNQEAKDLFAAVSANGLVANVFTYTIMMKNLIKEGSVEEADDPFLSMEKSGCTADSYMLNLIVRMLLEKGELVKAGNYMSKVDAKSYSLEAETVSLLISLFSGKGKYREHIGLLPTKYRFREEAATV

SEQ ID NO: 932 - protein, 221 aa, Triticum aestivum; identical to SEQ ID NO: 928

SEQ ID NO: 933 - protein, 432 aa, Triticum aestivum; identical to SEQ ID NO: 929

SEQ ID NO: 934 - protein, 432 aa, Triticum aestivum; identical to SEQ ID NO: 929

SEQ ID NO: 935 - protein, 221 aa, Triticum aestivum; identical to SEQ ID NO: 928

SEQ ID NO: 936 - protein, 221 aa, Triticum aestivum; identical to SEQ ID NO: 928

SEQ ID NO: 937 - protein, 221 aa, Triticum aestivum; identical to SEQ ID NO: 928

SEQ ID NO: 938 - protein, 439 aa, Triticum aestivum
MPTARLSSISTSSFRAPSRKPRAPLAALAAATERVRAGTLSREDAHHLFDELQGQAAAVPERGLNNFLAALARAPPSSACSDGPGLAFALFNRMSRGAGARVVSPTLCTYSILMDCCCRAGRPDLVVAFFGRLLRLGLRLNVISFNNLLKGLCQAKRSNEALDMLLHRMPEQDCAPDVFSFNIVINGCFREGEVDKACNLFHEMPQLGVQPDVVTYNSIIIALSRAGAMGKAEVVLRQMVDKGIGPDVMTYNSLIHGYSTLGQWKAAVRVFKEMVSVGVLPNAVTLNSFMDSLCKHRRTKEARDIFDSMAAKGHKPNIASYSTMLNGYAKQGCFDDMTGLFNSMLQNGVVPNHHIFNILINAYAKRGLMDEAMHMFEVMRQQGVNPDVFSYQIVMDSLCKWVGWMLLWTNLIRWSIKEFHLTKLFTNAWFWVLVLMVIL

SEQ ID NO: 939 - protein, 431 aa, Triticum aestivum
  SITE 390: note = misc_feature - Xaa can be any naturally occurring amino acid
MPTARLSSISTSSFRAPSRKPRAPLAALAAATERVRAGTLSREDAHHLFDELQGQAAAVPERGLNNFLAALARAPPSSACSDGPGLAFALFNRMSRGAGARVVSPTLCTYSILMDCCCRAGRPDLVVAFFGRLLRLGLRLNVISFNNLLKGLCQAKRSNEALDMLLHRMPELDCAPDVFSFNIVINGCFREGEVDKACNLFHEMPQLGVQPDVVTYNSIIIALSRAGAMGKAEVVLRQMVDKGIGPDVMTYNSLIHGYSTLGQWKAAVRVFKEMVSVGVLPNAVTLNSFMDSLCKHRRTKEARDIFDSMAAKGHKPNIASYSTMLNGYAKQGCFDDMTGLFNSMLQNGVVPNHHIFNILINAYAKRGLMDEAMHMFEVMKQQGVNPDVVXYLVVMDSLCKMGKMAAAMDKFNQMINQGVSPNKAVYQCLGK

SEQ ID NO: 940 - protein, 412 aa, Triticum aestivum
MSRRMVRRVLERNIEERYRAGHIGTEDALHLFDELLQVAGPSSTRAINCLLYVVGRDCPALGVSLFNRVARAKVPPHNVTYSILIGCCCHAGRLDLGFAAMGNIIKLGFAAEAMFSFSHLLRAVCAENKTSYAMDIALRRMPEFNCTPNVFSYSILLKGLCVEKRSQEALELIHMMVDAGGSCQPNVVSYSTVVDGLLKEGEVNKAYSLLCEMLHQGISPNVVTYSSIIFSMCKVQAMDKAEEVLQQMFDTGILPNITTYNSLIHGYYSSGQCEEVVRIFKKMSRNGVQPDIATYNIQMDYLCKSRRFAEARTIFDSMAGKDQKPNVTSCSILLHAYAMEQSFHDMHCLIELMVENGIAPDHSVYNILIVVYAKGKMVDEVMHIFTKMRQQGLNPNAANYGTVINLQYWPNG

SEQ ID NO: 941 - protein, 412 aa, Triticum aestivum; identical to SEQ ID NO: 940

SEQ ID NO: 942 - protein, 412 aa, Triticum aestivum; identical to SEQ ID NO: 940

SEQ ID NO: 943 - protein, 412 aa, Triticum aestivum; identical to SEQ ID NO: 940

SEQ ID NO: 944 - protein, 412 aa, Triticum aestivum; identical to SEQ ID NO: 940

SEQ ID NO: 945 - protein, 412 aa, Triticum aestivum; identical to SEQ ID NO: 940

SEQ ID NO: 946 - protein, 425 aa, Triticum aestivum
MSNLRLLRRSSSSMSTTTSPPSRSWSPHSAFAAATERVRAGTLSQDDAHHLFDELLRQATPVHERSLNGFLAALARATSSAACIRDGPALAIALFNRVCREQAGPRVAPLTVHTYGILMECCCRAGHPELGLAIFSRLLRTGLKTNEIVGSTFLKCLSYTKRTDEALNVLLHRMPELGCVPNAFSYSIVLKSLCDNSMSQRALDLLQRMAKEGGGCFLNVVTYSTVIHGFFKEGEIGKACSLFHEMMQQGIEPDVWTYNSIIDALCKARAMDKAELVLRQMVAKGAQPDTVTYNCMINGYATSGRLKEAAKMFREMKSRGVTPNIVTCGSLMTSLCKHGRSKEARQIFDSMTAKGHRANVVSYSILLHGYANEGCFADMIDLFNSMKSNGIAADCHVFNILINGYAKRGMMDEAVLILLKCGKKE

SEQ ID NO: 947 - protein, 425 aa, Triticum aestivum; identical to SEQ ID NO: 946

SEQ ID NO: 948 - protein, 425 aa, Triticum aestivum; identical to SEQ ID NO: 946

SEQ ID NO: 949 - protein, 425 aa, Triticum aestivum; identical to SEQ ID NO: 946

SEQ ID NO: 950 - protein, 425 aa, Triticum aestivum; identical to SEQ ID NO: 946

SEQ ID NO: 951 - protein, 425 aa, Triticum aestivum; identical to SEQ ID NO: 946

SEQ ID NO: 952 - protein, 429 aa, Triticum aestivum
MEHASKIFDDMMSHGLEPSNITYGILINGYCKNRRIDDGLILFKEMLHKGLKPTTFNYSLDIAMDKFNQMVDMGVRPNAIVYHSLIQGFCTHGDLVKAKELVAEMRNKAMRPPDIKFFHSIMQNLCTEGRVIEARDILDLIVRIGMRPDVPIFNLLIGGYCLVRKMADASKIFDDMVSYGLEPSNITYGILINGYCKNRRIDEGLILFKEMLCKGLKPTTFNYNVILDGLFLAGRTVAAKEKFDEMVESGVSVCIGTYSIVLGGLCRNNCSGEAITLFQKLSTMDVKFNIIIVIDAFYKVQRNQEAKDLFAAVSANGLVANVFTYTIMMKNLIKEGSVEEADDLFLSMEKSSCTADSYMLNLIVRMLLGKGEIVKAGNYISKIDAKSYSLEAKTVSLLISLFSGKGKYREHIGLLPAKYRFREEAATVV

SEQ ID NO: 953 - protein, 363 aa, Triticum aestivum
MSRLRPRRSSTTPMFHLLRRSSSSTSTSTPTLRPSRSWSPHAAFAAATERVRAGTLSPEDAHHLFDELLRQATPVPSRSLDGFIAALARAPASAACIRDGPALALGLFNRVCRDEAGARVAPRTIFTYGILMNCCCCAHRPDLGLALFGRFLRTGMKANEIIATTFLKCLCSAKRTDEAVNLLLHRIPELGCVRNAFSYSIVLKSFCENSMSQRGLDLLQMMAKEGGACSPNVVAYSTVIHGFFKEGETGKACNLFHEMMQQGVVPTVATYNSIIDALCKARAMDKAEIVLRQMVDNGAQPDNWTYNCMIHGYSTSGQLREATKMLRKMTTRGLIPDIVTCSSLMASLCKHGRSKEASDFFVP

SEQ ID NO: 954 - protein, 363 aa, Triticum aestivum
MSRLRPRRSSTTPMFHLLRRSSSSTSTSTPTLRPSRSWSPHAAFAAATERVRARTLSPEDAHHLFDELLRQATPVPSRSLDGFIAALARAPASAACIRDGPALALGLFNRVCRDEAGARVAPPTIFTYGILMNCCCCAHRPDLGLALFGRFLRTGMKANEIIATTFLKCLCSAKRTDEAVNLLLHRIPELGCVRNAFSYSIVLKSFCENSMSQRGLDLLQMMAKEGGACSPNVVAYSTVIHGFFKEGETGKACNLFHEMMQQGVVPTVATYNSIIDALCKARAMDKAEIVLRQMVDNGAQPDNWTYNCMIHGYSTSGQLREATKMLRKMTTRGLIPDIVTCSSLMASLCKHGRSKEASDFFVP

SEQ ID NO: 955 - protein, 363 aa, Triticum aestivum; identical to SEQ ID NO: 953

SEQ ID NO: 956 - protein, 363 aa, Triticum aestivum; identical to SEQ ID NO: 953

SEQ ID NO: 957 - protein, 363 aa, Triticum aestivum; identical to SEQ ID NO: 953

SEQ ID NO: 958 - protein, 363 aa, Triticum aestivum; identical to SEQ ID NO: 954

SEQ ID NO: 959 - protein, 433 aa, Triticum aestivum
MSRLQVRSFSSPVSSRANDLLTELHGHLGFGTLRPELAHQLFDEMLRQPVPVSARALNGLFAALACAPPSAACTDGPVLAIHLFNRMARAGCRRVIALTSHTYSILIECCCRARRPDLGPSFFTHLLKTGVTADIVIYSGLFKCLCDLKCTEEALDMLLHRMPNDVSDAISYSVILKSLCDNGRSQLALDVLHIMTKKGADYSPDVFAYNMVIDGFFKEGEVSKACDLFHEMIQQGVVPDVAMYTSIINALCKARAMDKAEVVLQSMVHNGVQPDVVTYTILIQGYSTLRQLKEVARLLKVMRSQGVMPSVVTYNSLMTCLCKNGRFKEAVEIFYSMAVKGLKPNVISYSIILHGYAKEGSLVAMIDLYQLMAAEGVIPDLHCFNILIAAYAEYGMMDVAMLFFEDMLKQGVNPNEVTNFVCDSWIMQNGQDG

SEQ ID NO: 960 - protein, 433 aa, Triticum aestivum
MSRLQVRSFSSPVSSRANDLLTELHGHLGFGTLRPELAHQLFDEMLRQPVPVSARALNGLFAALACAPPSAACTDGPVLAIHLFNRMARAGCRRVIPLTSHTYSILIECCCRARRPDLGPSFFTHLLKTGVTADIVIYSGLFKCLCDLKCTEEALDMLLHRMPNDVSDAISYSVILKSLCDNGRSQLALDVLHIMTKKGADYSPDVFAYNMVIDGFFKEGEVSKACDLFHEMIQQGVVPDVAMYTSIINALCKARAMDKAEVVLRSMVHNGVQPDVVTYTILIQGYSTLRQLKEVARLLKVMRSQGVMPSVVTYNSLMTCLCKNGRFKEAVEIFYSMAVKGLKPNVISYSIILHGYAKEGSLVAMIDLYQLMAAEGVILDLHCFNILIAAYAEYGMMDVAMLFFEDMLKQGVNPNEVTNFVCDSWIMQNGQDG

SEQ ID NO: 961 - protein, 433 aa, Triticum aestivum; identical to SEQ ID NO: 959

SEQ ID NO: 962 - protein, 433 aa, Triticum aestivum; identical to SEQ ID NO: 959

SEQ ID NO: 963 - protein, 433 aa, Triticum aestivum; identical to SEQ ID NO: 959

SEQ ID NO: 964 - protein, 433 aa, Triticum aestivum; identical to SEQ ID NO: 959

SEQ ID NO: 965 - protein, 401 aa, Triticum aestivum
MARAGRRQATTPTIYTYNILMECCHRACCPDLGLAFFGRLLKTGIPTNIIDYSSLFKCLCDMKRTEEALNVLLHKMPDDLPNVISYSVILKSFCDNGRSQLALDLLQMMAKKGADHSPDVMSYNMVIGGFFKEGEVSKACDLFQEMIRHGIVPTEVTYSSIINALCKARAMDKAEVVLRSMVHNGAQPDAVTYNSLIQGYSTLGQLKEVARLLKVMRSQGVMPSVVTYNSLMTCLCKHGKTKEAEKIFYSMAVNGRKPDVISYSILLHGYAKEGSLIDMIDLCERMPRDGVVPNLHCFNILINAYAKHGMMDVALLFFEDMLKQVVKPNEFTYLTVISAFCKMGRMDDAMEKFREMIDMGVPVDTEVYMCIVEGYFKNGDSVKAKDFITKMIPNRPQKGNY

SEQ ID NO: 966 - protein, 428 aa, Triticum aestivum
MFSPTLFFSSLCNEKRSQEALELIHIMVDHGGSCQPNVVSYNTVVDGLLKEGEAGKAYSLFSEMLRQGISPDVVTCSSIIAGICKVHAMDKAEQVLQQMLDRGILPNVATYTSLIHGYYSLGQCEEVDRVLKEMSRNGVQPNIVTYNIQIDYLCKSGRCAEARKIFDSMISLGQKPTVTTYSILLHGYAIEKSFHHMHCLIDLMVENSIAPDHFVYNILISAYAKEEMVSEVLHIFTKMRQQGLNPNVASYGVIINLLSSIGRMDDAMSKFNQMITEGLAPNIIVFSTVISGFYSCGAWERVHEIFSEMLNRGIYPATVFFNIIMDHLCKEGRVMEAQDIFDLMVHMGVKPVVHNYKTLIHGYWSVSKMDEVSKLLDNVVLIGMEPDVVTYNTLIDGYSKNGRIDDALVVFREMMAGRLSLLLSLLLL

SEQ ID NO: 967 - protein, 413 aa, Triticum aestivum
MSRLRHSSATPISSLRLLRHISSSTSTPTPTSPTSCSWSPHAAFGAATERVRAGTLRPEDAHTLFDELLRQATPVPERSLNGFLAALARAPASGNCIRDGPALAVALFSRVCREEAGPQVAALTVCTYNILMDCCCRARRPELGLALFGRFLRKGLKTDQTGASTFLKCLCYAKRTDEAVDVLLHRMSELGCVPDAISYNTVLKSLCDNGMSQRGLELLQLVAGKGGGCFPDVVAYSTVIHGFFQEGEAGKACSLFHEMMQQGIVPSVVTYSSIIDALCKARAMDRAELVLRQMVANGAQPDTVTYNCMINGYATSGRLKESAKMFREMKSRGLMPDIVTCNSFLSSLCKHGRSKEAAEFFDSMTAKGHKPDIVSYRILLHGYATEGCFADMIDLFNAMERNGIAADCVFSTY

SEQ ID NO: 968 - protein, 413 aa, Triticum aestivum
MSRLRHSSATPISSLRLLRHISSSTSTPTPTSPTSCSWSPHAAFGAATERVRAGTLRPEDAHTLFDELLRQATPVPERSLNGFLAALARAPASGNCIRDGPALAVALFSRVCREEAGPQVVALTVCTYNILMDCCCRARRPELGLALFGRFLRKGLKTDQTGASTFLKCLCYAKRTDEAVDVLLHRMSELGCVPDAISYNTVLKSLCDNGMSQRGLELLQLVAGKGGGCFPDVVAYSTVIHGFFQEGEAGKACSLFHEMMQQGIVPSVVTYSSIIDALCKARAMDRAELVLRQMVANGAQPDTVTYNCMINGYATSGRLKESAKMFREMKSRGLMPDIVTCNSFLSSLCKHGRSKEAAEFFDSMTAKGHKPDIVSYRILLHGYATEGCFADMIDLFNAMERNGIAADCVFSTY

SEQ ID NO: 969 - protein, 413 aa, Triticum aestivum; identical to SEQ ID NO: 968

SEQ ID NO: 970 - protein, 413 aa, Triticum aestivum; identical to SEQ ID NO: 968

SEQ ID NO: 971 - protein, 413 aa, Triticum aestivum; identical to SEQ ID NO: 968

SEQ ID NO: 972 - protein, 413 aa, Triticum aestivum; identical to SEQ ID NO: 968

SEQ ID NO: 973 - protein, 391 aa, Triticum aestivum
MGHVIKLGFAAQAVVNFSHLLKAICAEKKTSYAMDIVLRVIPMFNCVPDVFSYSILFKGLCNERRSQEALELIHIMVQHGGSCQPNVVSYSTVIDGLLKEGEMNKAYSLFCEMLQWGISPNVVTCNSIISGMCKLHAMDKAEEVLQQMLDRGILPNSTTYNGLIHGYYSLGQCEEVGRIFKEMSRNGVQPNIVTYNIQMDYLCKSGRCAEARKIFDSMVSLGQKPDVTTYGILLHGYAMERSFHDIHCLIDLMVGNGLSPNNYIYSILISACAKEKMVDEAMHIFTKMQQQGFNPDVVSYGMVIDLLSSIGRMDDAMSQFNQMITEGLAPDIIVSTPLLVVSVLVANGRRFMNYFLRCWIAASVPTECSSTLIWITFAKVEGLWKPRISST

SEQ ID NO: 974 - protein, 391 aa, Triticum aestivum; identical to SEQ ID NO: 973

SEQ ID NO: 975 - protein, 406 aa, Triticum aestivum
MTDEAMLIFTEMREKGVGPDAFTYSTVIAALSRMGRLTDAMGKLSQMIAMGVQPDTAVYHSLIQGCCIHGDLVKAKELVSEMMNKGIPRPSIAFFSSVINYLCKEGRVMDAHDIFDLVIDMGERPDVITFNSLIDGYCLVDKMDKALRVLDSMVSFGIEPNVVTYNTLVNGYCTNGRIDDGLTLFREMPHKRIKPDTVTYGIILDGLFRSGSTVAARKMFHEMTESGITVSISTYSIILGGFCRNNCADEAITLFQKLGTMNVKFDIAILNTMINAMYKVGRREEAKDLFAAISPSSLVPNESTYAVMIKILLKDGAVEDADNMFSSMDNSGIVPSSRLINDIIRMLLEKGEIAKAGNYLSKVDGKSISLEASTASLMLSLFSRKGKHQEDIKLLPAKYQFFDGFG

SEQ ID NO: 976 - protein, 406 aa, Triticum aestivum
MTDEAMLIFTEMREKGVGPDAFTYSTVIAALSRMGRLTDAMGKLSQMIAMGVQPDTAVYHSLIQGCCIHGDLVKAKELVSEMMNKGIPRPSIAFFSSVINYLCKEGRVMDAHDIFDLVIDMGERPDVITFNSLIDGYCLVDKMDKALRVLDSMVSFGIEPNVVTYNTLVNGYCTNGRIDDGLTLFREMPHKRIKPDTVTYGIILDGLFRSGSTVAARKMFHEMTESGITVSISTYSIILGGLCRNNCADEAITLFQKLGTMNVKFDIAILNTMINAMYKVGRREEAKDLFAAISPSSLVPNESTYAVMIKILLKDRAVEDADNMFSSMDNSGIVPSSRLINDIIRMLLEKGEIAKAGNYLSKVDGKSISLEASTASLMLSLFSRKGKHQEDIKLLPAKYQFFDGFG

SEQ ID NO: 977 - protein, 406 aa, Triticum aestivum; identical to SEQ ID NO: 975

SEQ ID NO: 978 - protein, 406 aa, Triticum aestivum; identical to SEQ ID NO: 975

SEQ ID NO: 979 - protein, 406 aa, Triticum aestivum; identical to SEQ ID NO: 975

SEQ ID NO: 980 - protein, 406 aa, Triticum aestivum; identical to SEQ ID NO: 975

SEQ ID NO: 981 - protein, 411 aa, Triticum aestivum
MPRFSSTTSMSSLRLRLPLRLHARHSSSASQPSHSQGWDPHAAFAAATERARSGSLTPADAHHLFDELLRQANPVQERPLNNFLAALARAPALTVALFSLISKGARRRVAQPNVFTYGVLMDCCCRAHRPDLALAFFGRFLRTGLEADQVVFNTLLKGLCHAKQADEAVNVLLHRMPDLGCTPNVVAYNTVIHGFFREGQVGKACDMFHGMAHKGVMPNVVTYNSVIDALCKARAMDKAETVLSQMVNDGVGPNNVTYDSLIHGYSSLGNLKEAVRVFKEMSRRFTPDVVTCTSLMAFLCKNGKSKEAAEIFDSMATKGLKRDTVSYAILLHGYATEGCLVDMINLFNSMATDCILPNCHIFNILINAYAKSGKLDKAMLIFNEMQKQGVSPDLTRWLIWEYDRMQLFIIP

SEQ ID NO: 982 - protein, 411 aa, Triticum aestivum
MPRFSSTTSMSSLRLRLPLRLHARHSSSASQPSHSQGWDPHAAFAAATERARSGSLTPADAHHLFDELLRQANPVQERPLNNFLAALARAPALTVALFSLISKGARRRVAQPNVFTYGVLMDCCCRAHRPDLALAFFGRFLRTGLEADQVVFNTLLKGLCHAKQADEAVNVLLHRMPDLGCTPNVVAYNTVIHGFFREGQVGKACDMFHGMAHKGVMPNVVTYNSVIDALCKARAMDKAETVLSQMVNDGVGPNNVTYNSLIHGYSSLGNLKEAVRVFKEMSRRFTPDVVTCTSLMAFLCKNGKSKEAAEIFDSMATKGLKRDTVSYAILLHGYATEGCLVDMINLFNSMATDCILPNCHIFNILINAYAKSGKLDKAMLIFNEMQKQGVSPDLTRWLIWEYDRMQLFIIP

SEQ ID NO: 983 - protein, 409 aa, Triticum aestivum
MPCQHPPWPAPARPTTCELSRLTSAAARAELIPASAAAASPLPPRCPRAAVLLATPPSLHSTTPMSRIRLRRSRLFSSCATTPPPAGSWSPHAAFAAATERALAGKLSGEDAHHLFDELLRQATPVPERSLNGFLTALARAPDSSTFRNGPALARAPDSSTFRNGPALAIALFNRLCREEAGSRVAWPTVCTYNILMDCRCRTRRPDLGPAFLGRLLRTGLKTNQIVANTLLKCLCYAKRTDEAVNVLLHKMSELGCVPDAISYNTVLKRLCEDSRSQGALDLLRTVAKEGGVGSLDVVSHGTVIHGFFKEGETGKACNLFHEMTQQGIVPNVVTYNLIIDALCKARAMDKAELILRQMVDNGVRPDTVTCSSIMSSLCKHGRSKEAAEIFDSMTAKGLKADVFSYSVS

SEQ ID NO: 984 - protein, 409 aa, Triticum aestivum; identical to SEQ ID NO: 983

SEQ ID NO: 985 - protein, 224 aa, Triticum aestivum
MPCQHPPWPAPARPTTCELSRLTSAAARAELIPASAAAASPLSPRRPRAAVLLATPPSLHSTTPMSRIRLRRSRLFSSCATTPPPAGSWSPHAAFAAATERALAGKLSGEDAHHLFDELLRQATPVPERPLNGFLTALARAPDSSTFRNGPALARAPDSSTFRNGPALAIALFNRLCREEAGSRVAWPTVCTYNILMDCCCRTRRPDLGPAFLGRLLRTGLKTN

SEQ ID NO: 986 - protein, 409 aa, Triticum aestivum; identical to SEQ ID NO: 983

SEQ ID NO: 987 - protein, 367 aa, Triticum aestivum
MPVMPRFYSTTPMPRLLRRLSSTSTSTSGPSRCWDPSAALAAATERVRAGTLSPADARHLFDELLQRPTPVPGQALNGFLAALARAPASAACGDSPALAVSLFNRLCREASPHASPLTVHTYSILMDCCCRARRPDLGLAFFGRLLRTGLRTDGVDAYALIKCFCLAKRTDEAVSVLLHRLSELGCVPDALSYSVVLKVLCDDSRSQRALDLLRMMSKEGGVCAPNVVPYSTVIHGFCKEGKVSKACDLFNKMGQQGVKPNVVTYTSIIDALCKARAMDKAESFLRHMVDNDVRPNNVTYKCIIQGYSSLGLWNEAVKIFREMTSRGLMLDDVTRNSFVASLCNHGRSKEAAEIAHQMIESETTVSN

SEQ ID NO: 988 - protein, 367 aa, Triticum aestivum; identical to SEQ ID NO: 987

SEQ ID NO: 989 - protein, 367 aa, Triticum aestivum; identical to SEQ ID NO: 987

SEQ ID NO: 990 - protein, 367 aa, Triticum aestivum; identical to SEQ ID NO: 987

SEQ ID NO: 991 - protein, 367 aa, Triticum aestivum; identical to SEQ ID NO: 987

SEQ ID NO: 992 - protein, 367 aa, Triticum aestivum; identical to SEQ ID NO: 987

SEQ ID NO: 993 - protein, 370 aa, Triticum aestivum
MPAARLSSFKAPSRERRPPLAALAAATERVRAGTLSRQDAHHLFDELLSQAATVPVRKLNNFLAALARAPPSTACSDGPGLAIALFNRMSRGAGARVVSPTLCTYSILIDCCCRARRPDLVVAFFGRLLRLGLLLEVISFNNLLKGLCQAKRSNEALDMLLHRTPELHCAPDVFSYNIVINGCLKEGEVDKACNLFHEMPQLGVQPDVVTYTSIMDALSKSGAMDKAEVLLRQMVDQGIEPNIKTYSYLIHGYSTFGQWKEALRVFKEMASLGVVPDVVTLTSLIDSLCKHRRTKEAREIFDSMAAKGLKPNIVSYSTMLNGYVKEGSFEDMTDLFNSMVRNGIVPNHHIFNILINAYAKRGGVKCTVGP

SEQ ID NO: 994 - protein, 356 aa, Triticum aestivum
MSRLRLRLPRGSSSPTTLIPRLRLLRRCSTSTSTSSPSRSWSPRDAFAAATERVRAGTLSLEDAHKLFDELLGQATPVPERSLNGFLAALARAPASGACIRDGPALAVALFNRVCREEAGAQVAALTVCTYNILMDCCCRARRPDLGLALFGCFLRKGLKTDQTGANTFLKCLCYAKRTDEAVNVLLHRMSELGCVPNAVSYNTVLKGLCDNSMSQRALDLLQMVAGKGGGCFPDVVAYSTVIHGFFKEGETGKACSLFHEMMQQGIVPSVVTYNSIIDALCKVREVDKAELVLRQMVAKGAQPDTVTYNCMINGYATSGRLKAGVLHQMLLLATRSWPPFASTEVAKKLQNFLIP

SEQ ID NO: 995 - protein, 331 aa, Triticum aestivum
MAPNHFVYNILISAYGQEETVGEVMHIFTKMRQEGLNPDVANYGAVINLLSSIGRMDDAKSQYNQMITEGLLPGIIVFTPLISGFCSCGKWEKVPELFSEMLDRGICPNTVFFNAIMDRLCKNGRVMEAQDLFDLMVHMGVKPDVCTYNTLIGGYLFVGKMDEVRKLLDNMVSIGLKPDVITYSILIDGYSKNGRIDDALVVSREMLAGKVKPCVITFNIMIGALLKCGRKAETKDLFDGIWANGLVPDVITYSLMIQKLIEEGSLQESDDLFLSMEKNGCVADSHMLNAIVRSLLRKGEVPRAGTYLSKIDERVFTLEASTCFRGERPRI

SEQ ID NO: 996 - protein, 411 aa, Triticum aestivum
MWASHLLDPHVIDTKVGALMHGSIVPSARASRQLTRQSVPHPPPVTLLLLLLLYLADVRLPPPLLLHFITLMSSIHLRHCSTMPMSHVCLRRRLSSSSSSFSNCTSPPSPPWSPHAAFAAATERVRARTLSPEDAHHLFDVLFQQATPVPERSLDGFLAALSRATPSEACGDGPALALTLFNRVCREEAGMQVVPPTIFTYGILMNCCCRERRPDLGLAFFGRILKAGLKTNLITANTVLKCLYCAKHTDEAVDMLLHRMSDLGCVPDDFSYNTVLHGFFKEGKIGKACNLFHEMMLQGFVPDVVTYNLIIEALCKARAMDNAELFLRQMVDNVVPPDKVTYTSMIHGYSTLGRWKEATKMFREMTSRGLIPNIVTWSSFMDSLCKHGKSKEAAEIFFSMAGKGHKPNIVS

SEQ ID NO: 997 - protein, 338 aa, Triticum aestivum
MSSIHLRHCSTMPMSHVCLRRRLSSSSSSSNCTSPPSPPWSPHAAFPAATERVRARTLSPEDAHHLFDVLFQQATPVPERSLDGFLAALSRATPSEACGDGPALALTLFNRVYREEAGMQVVPPTIFTYGILMNCCCRERPDLGLAFFGRILKAGLKTNLIAANTVLKCLYCAKHTDEAVDMLLHRMSDLGCVPDDFSYNTVLHGFFKEGKIGKARNLFHEMMLQGFVPDVVTYNLIIEALCKARAMDNAELFLRQMVDNVVPPDKVTYTSMIHGYSTLGRWKEATKMFREMTSRGLIPNIVTWSSFMDSLCKHGKSKEAAEIFFSMAGKGHKPNIVS

SEQ ID NO: 998 - protein, 338 aa, Triticum aestivum; identical to SEQ ID NO: 997

SEQ ID NO: 999 - protein, 340 aa, Triticum aestivum
MSSIHLRHCSTMPMSHVCLRRRLSSSSSSFSNCTSPPSPPWSPHAAFAAATERVRARTLSPEDAHHLFDVLFQQATPVPERSLDGFLAALSRATPSEACGDGPALALTLFNRVCREEAGMQVVPPTIFTYGILMNCCCRERRPDLGLAFFGRILKAGLKTNLITANTVLKCLYCAKHTDEAVDMLLHRMSDLGCVPDDFSYNTVLHGFFKEGKIGKACNLFHEMMLQGFVPDVVTYNLIIEALCKARAMDNAELFLRQMVDNVVPPDKVTYTSMIHGYSTLGRWKEATKMFREMTSRGLIPNIVTWSSFMDSLCKHGKSKEAAEIFFSMAGKGHKPNIVS

SEQ ID NO: 1000 - protein, 338 aa, Triticum aestivum; identical to SEQ ID NO: 997

SEQ ID NO: 1001 - protein, 392 aa, Triticum aestivum
MHGSIVPSARASRQLTRQSVPHPPPVTLLLLLLLYLADVRLPPPLLLHFITLMSSIHLRHCSTMPMSHVCLRRRLSSSSSSFSNCTSPPSPPWSPHAAFAAATERVRARTLSPEDAHHLFDVLFQQATPVPERSLDGFLAALSRATPSEACGDGPALALTLFNRVCREEAGMQVVPPTIFTYGILMNCCCRERRPDLGLAFFGRILKAGLKTNLITANTVLKCLYCAKHTDEAVDMLLHRMSDLGCVPDDFSYNTVLHGFFKEGKIGKACNLFHEMMLQGFVPDVVTYNLIIEALCKARAMDNAELFLRQMVDNVVPPDKVTYTSMIHGYSTLGRWKEATKMFREMTSRGLIPNIVTWSSFMDSLCKHGKSKEAAEIFFSMAGKGHKPNIVS

SEQ ID NO: 1002 - protein, 221 aa, Triticum aestivum
MQVVPPTIFTYGILMNCCCRERRPDLGLAFFGRILKAGLKTNLITANTVLKCLYCAKHTDEAVDMLLHRMSDLGCVPDDFSYNTVLHGFFKEGKIGKACNLFHEMMLQGFVPDVVTYNLIIEALCKARAMDNAELFLRQMVDNVVPPDKVTYTSMIHGYSTLGRWKEATKMFREMTSRGLIPNIVTWSSFMDSLCKHGKSKEAAEIFFSMAGKGHKPNIVS

SEQ ID NO: 1003 - protein, 407 aa, Triticum aestivum
MAMKGLKPDNVSYAILLHGYATEGCLVDMINLFNSMERNCILPDCCIFNILINAYAKSGKLDKAMLIFNEMQKQGVSPDAVTYLPVIDAFCKKGRLDDAMIMFNQMIDTGVRPDTAVYTSLIQGFCTHGDLVKAKELVTEMMNKGIPPPDIKFFHSIMQNLCTEGRVIEARDILGLIAHIGMRPNVCTFNILIGGYCLVRKMEDASKIFDDMMSYGLEPSNITYGILINGYCKNLRIDDGLILFKEMLRKGVKPTTFNYNVILDGLFLAGRTVAAKEKFHEMAESGADVCIDTYCIVHRSQHKKRHGRNEARPPGGRRTAGCTRAHSTTTASPRGGLAGTRSCRREDAGQPGHGNGWPGEVERMGGWEEEDASHRAVPATMARRSRGGDPRSATRRGRGEEHRHDDH

SEQ ID NO: 1004 - protein, 407 aa, Triticum aestivum; identical to SEQ ID NO: 1003

SEQ ID NO: 1005 - protein, 407 aa, Triticum aestivum; identical to SEQ ID NO: 1003

SEQ ID NO: 1006 - protein, 407 aa, Triticum aestivum; identical to SEQ ID NO: 1003

SEQ ID NO: 1007 - protein, 407 aa, Triticum aestivum
MAMKGLKPDNVSYAILLHGYATEGCLVDMINLFNSMERNCILPDCCIFNILINAYAKSGKLDKAMLIFNEMQKQGVSPDAVTYLPIIDAFCKKGRLDDAMIMFNQMIDTGVRPDTAVYTSLIQGFCTHGDLVKAKELVTEMMNKGIPPPDIKFFHSIMQNLCTEGRVIEARDILGLIAHIGMRPNVCTFNILIGGYCLVRKMEDASKIFDDMMSYGLEPSNITYGILINGYCKNLRIDDGLILFKEMLRKGVKPTTFNYNVILDGLFLAGRTVAAKEKFHEMAESGADVCIDTYCIVHRSQHKKRHGRNEARPPGGRRTAGCTRAHSTTTASPRGGLAGTRSCRREDAGQPGHGNGWPGEVERMGGWEEEDASHRAVPATMARRSRGGDPRSATRRGRGEEHRHDDH

SEQ ID NO: 1008 - protein, 405 aa, Triticum aestivum
MAMKGLKPDNVSYAILLHGYATEGCLVDMINLFNSMERNCILPDCCIFNILINAYAKSGKLDKAMLIFNEMQKQGVSPDAVTYLPIIDAFCKKGRLDDAMIMFNQMIDTGVRPDTAVYTSLIQGFCTHGDLVKAKELVTEMMNKGIPPPDIKFFHSIMQNLCTEGRVIEARDILGLIAHIGMRPNVCTFNILIGGYCLVRKMEDASKIFDDMMSYGLEPSNITYGILINGYCKNLRIDDGLILFKEMLRKGVKPTTFNYNVILDGLFLAGRTVAAKEKFHEMAESGADVCIDTYCIVHRSQHKKRHGRNEARPPGGRRTAGCTRAHSTTTASPRGGLAGTRSCRREDAGQPGHGNGWPGEVERMGGWEEEDASHRAVPATMARRSRGGDPRSATRRGRGEEHRHD

SEQ ID NO: 1009 - protein, 391 aa, Triticum aestivum
MYISSLDLKFLGVVATFLANIHILFRNFWKYLRYIFKHGAPGVYKDGSTRYSPGRAHPMPRLYPTTPMLRLLPLPSRRWDPRGAFASATERARAGTLSPEDAHHLFDELLLQANPVPERSLNGFLAALARAPSSAALRDGPSLALGLFNRVCREEAGPRVVPPTVCTYNILMDSCCRARRPDLGLAFFDRFLRMGLKADQIVANNLLKCLCHARRTHEAINVLLHRMSEFGCVPNVISYSIVLKSLCDDSRSQQAFDLLQMVRKEGGAGSLNVVAYSTVIHAFFKEGEASKACDLFHEMMQQGIVPNVVTYSSIIDALCKVRAMDKAKLVLQQMVDNGVRPNMYTWNSFMYSLCKNGRSKEAAEFFDSMTPKGLKPNIVVYSTLLHGYASE

SEQ ID NO: 1010 - protein, 391 aa, Triticum aestivum; identical to SEQ ID NO: 1009

SEQ ID NO: 1011 - protein, 391 aa, Triticum aestivum; identical to SEQ ID NO: 1009

SEQ ID NO: 1012 - protein, 391 aa, Triticum aestivum; identical to SEQ ID NO: 1009

SEQ ID NO: 1013 - protein, 391 aa, Triticum aestivum; identical to SEQ ID NO: 1009

SEQ ID NO: 1014 - protein, 391 aa, Triticum aestivum; identical to SEQ ID NO: 1009

SEQ ID NO: 1015 - protein, 391 aa, Triticum aestivum
MYISSLDLKFLGVVATFLANIHILFRNFWKYLRYVFKHGAPGVYKDGSTRYSPGRAHPMPRLYPTTPMLRLLPLPSRRWDPRGAFASATERVRAGTLSPEDAHHLFDELLLQANPVPERSLNGFLAALARAPSSAALRDGPSLALGLFNRVCQEEAGPRVVPPTVCTYNILMDSCCRARRPDLGLAFFGRFLRMGLKADQIVANNLLKCLCHARRTDEAINVLLHRMSEFGCVPNVISYSIVLKSLCDDSRSQQAFDLLQMVRKEGGAGSLNVVAYSTVIHAFFKEGEASKACDLFHEMMQQGIVPNVVTYSSIIDALCKVRAMDKAKLVLQQMVDNGVRPNMYTWNSFMYSLCKNGRSKEAAEFFDSMTSKGLKPNIVVYSTLLHGYASE

SEQ ID NO: 1016 - protein, 331 aa, Triticum aestivum
MAPNHFVYNILISAYAQEETVGEVMHIFTKMRQEGLNPDVANYGAVINLLSSIGRMDDAMSQYNQMITEGLLPGIIVFTPLISGFCSCGKWEKVPELFSEMLDRGICPNTVFFNTIMDRLCKNGRVMEAQDLFDLMVHMGVKPDVCTYNTLIGGYLFVGKMDEVRKLLDNMVSIGLKPDVITYSILIDGYSKNGRIDDALVFSREMLAGKVKPCVITFNIMIGALLKCGRKAETKDLFDGIWANGLVPDVITYSLMIQKLIEEGSLQESDDLFLSMEKNGCVADSHMLNAIVRSLLRKGEVPRAGTYLSKIDERVFTLEASTCFRGERPRI

SEQ ID NO: 1017 - protein, 331 aa, Triticum aestivum; identical to SEQ ID NO: 1016

SEQ ID NO: 1018 - protein, 331 aa, Triticum aestivum; identical to SEQ ID NO: 1016

SEQ ID NO: 1019 - protein, 363 aa, Triticum aestivum
MSELGCVPDALSYSVVLKVLCDDSRSQRALDLLQMMSKEGGGCAPNVVAYSTFIHGFCKEGKVSQACDLFDEMVQQGVKPNVVTYTSVIDALCKARAMDKAESFLRHMVNHGVRPNNVTYKYMIQGYSTLGWLKEAVKIFRETTSRGLILDDVTRNLFVASLCNHGRSKEAAEFAHQMIETGTTVSISTYSIILGELCRNNCTEEAIILFRKLGAVNVKFDITIFNTMIDAMYRVQRREEANILFAAISANGLVPNASTYRIMITSIVKEGSMEEADHMFSSMETSGYAPSSVLLNDIIRMLLEKGEIVKAGNYLSKVDGKCISLEASTGLLMMHLFSREGKYHEQIRSLPARYEFFGVSTVE

SEQ ID NO: 1020 - protein, 363 aa, Triticum aestivum
MSELGCVPDALSYSVVLKVLCDDSRSQRALDLLQMMSKEGGGCAPNVVAYRTFIHGFCKEGKVSQACDLFDEMVQQGVKPNVVTYTSVIDALCKARAMDKAESFLRHMVNHGVRPNNVTYKYMIQGYSTLGWWKEAVKIFRETTSRGLILDDVTRNLFVASLCNHGRSKEAAEFAHQMIETGTTVSISTYSIILGELCRNNCTEEAIILFRKLGAVNVKFDITIFNTMIDAMYRVQRREEANILFAAISANGLVPNASTYRIMITSIVKEGSMEEADHMFSSMETSGYAPSSVLLNDIIRMLLEKGEIVKAGNYLSKVDGKCISLEASTGLLMMHLFSREGKYHEQIRSLPARYEFFGVSTVE

SEQ ID NO: 1021 - protein, 363 aa, Triticum aestivum; identical to SEQ ID NO: 1019

SEQ ID NO: 1022 - protein, 363 aa, Triticum aestivum; identical to SEQ ID NO: 1019

SEQ ID NO: 1023 - protein, 363 aa, Triticum aestivum; identical to SEQ ID NO: 1020

SEQ ID NO: 1024 - protein, 363 aa, Triticum aestivum; identical to SEQ ID NO: 1019

SEQ ID NO: 1025 - protein, 368 aa, Triticum aestivum
MIDTGVRPDTAVYRSLIQGFCTHGDLVKAKEYVTEMMNKGMLPPDIMFFSSIMQNLCTEGRVIEARDILDLMVHIGMRPDVPIFNLLIGGYCLVCKMEDATKVFDDMVSYGLEPCNITDGMLINGYCKNRRIDDGLILFKEMLHKGLKPTTFNYNVILDGLFLAGRTVAAKEKFNEMVESGVSMCISTYSIVLGGLCRNSCSSEAITLFQKLSTMNVKFDIRIVNIMIGAFYRVRRNQEAKDLFAAIPSNGLAANVVTYSIMIINLIKEGSVEEADNLFLSMEKSGCTADSCMLNHIIRRLLEKGEMVKAGNYISKVDANSYSLEAKTVSLLISLFSRKGKYREHITLLPTKYQFREEAATVELFDTW

SEQ ID NO: 1026 - protein, 368 aa, Triticum aestivum; identical to SEQ ID NO: 1025

SEQ ID NO: 1027 - protein, 368 aa, Triticum aestivum; identical to SEQ ID NO: 1025

SEQ ID NO: 1028 - protein, 368 aa, Triticum aestivum; identical to SEQ ID NO: 1025

SEQ ID NO: 1029 - protein, 368 aa, Triticum aestivum; identical to SEQ ID NO: 1025

SEQ ID NO: 1030 - protein, 368 aa, Triticum aestivum; identical to SEQ ID NO: 1025

SEQ ID NO: 1031 - protein, 396 aa, Triticum aestivum
MREKGVSPDVVTYTTVIAALSRMGRLTDAVDKFDEMIAMGVQPSIPVYQSLIQGFCIDGDLVKAKELVSEMMNKGIPCPNIVFFNSVINSLCKEGRVMDAHDIFDLVIDIGERPDTITFSSLIDGYCLVGKMDKAFGMLNAMESVGVEPDIVTYSTLLDGYFKNGRIDDGLTLFREMPRKRIKPDTVTYGIILDGLFRSGRTVAAWKMFHEMIESGTTVTFSIYAIILGGFCRNNCADEAITLFHKLGAMNVKFNIAIVNTMINAMYKVGRREEAKELFAGILARGLVPNESTYGVMIKNLLKDGVVEDANNVFSSMDKSGIVPSSRLINDIIRLLLEKGEIAKAGYYLSKVDGKSISLEASTTSLMFSLFSMKGKYKEHMKLLPAKYQFFDELVD

SEQ ID NO: 1032 - protein, 277 aa, Triticum aestivum
MIKCNTEANDKTTTTNNWKTPGATVSGRYTDIVTYSTLLDGYFKNGRIDDGLTLFREMPRKRIKPDTVTYGIILDGLFRSVRIVAAWKMFHEMIESGTTVTFSIYAIILGGFCRNNCADEAITLFHKLGAMNVKFNIAIVNTMINAMYKVGRREEAKELFAGILARGLVPNESTYGVMIKNLLKDGAVEDANNVFSSMDKSGIVPSSRLINDIIRLLLEKGEIAKAGYYLSKVDGKSISLEASTTSLMFSLFSRKGKYKEHMKLLPAKYQFFDELVD

SEQ ID NO: 1033 - protein, 396 aa, Triticum aestivum; identical to SEQ ID NO: 1031

SEQ ID NO: 1034 - protein, 396 aa, Triticum aestivum; identical to SEQ ID NO: 1031

SEQ ID NO: 1035 - protein, 396 aa, Triticum aestivum; identical to SEQ ID NO: 1031

SEQ ID NO: 1036 - protein, 396 aa, Triticum aestivum; identical to SEQ ID NO: 1031

SEQ ID NO: 1037 - protein, 396 aa, Triticum aestivum; identical to SEQ ID NO: 1031

SEQ ID NO: 1038 - protein, 396 aa, Triticum aestivum
MDPTARIEGQYSTVIHTFCKKGRLDDAVIKFNQMIDTGVRPDTAVYSSLIQGFYTHGDLVKAKEYVTEMMKKGMLPPDIKFFHSIMQNLCTEGRVIEARDVLGLIAHIGMRPDVCTFNILIGGYCLVGKMEDASKIFDDMMSYGLEPSNITYGILINGYCKNRRIDDGLILFKEMLHKGLKPTTFNYNVILDGLFLAGRTVAAKEKFDEMVESGVSVCIGTYSTVLGGLCRNNCSGEAITLFQKLSTMDVKFNIIIVNIMIDAFYKVQRNQEAKDLFAAVSANGLVANVFTYTIMMKNLIKEGSVGEADDLFLSMEKSCCTADSYMLNLIVRMLLGKGEIVKAGNYISKIDAKSYSLEAKTVSLLISLFSGKGKYREHIGLLHTKYPFREEAATVV

SEQ ID NO: 1039 - protein, 396 aa, Triticum aestivum
MDPTARIEGQYSTVIHTFCKKGRLDDAVIKFNQMIDTGVRPDTAVYSSLIQGFYTHGDLVKAKEYVTEMMKKGMLPPDIKFFHSIMQNLCTEGRVIEARDVLGLIAHIGMRPDVCTFNILIGGYCLVGKMEDASKIFDDMMSYGLEPSNITYGILINGYCKNRRIDDGLILFKEMLHKGLKPTTFNYNVILDGLFLAGRTVAAKEKFDEMVESGVSVCIGTYSTVLGGLCRNNCSGEAITLFQKLSTMDVKFNIIIVNIMIDAFYKVQRNQEAKDLFAAVSANGLVANVFTYTIMMKNLIKEGSVEEADDLFLSMEKSGCTADSYMLNLIVRMLLGKGEIVKAGNYISKIDAKSYSLEAKTVSLLISLFSGKGKYREHIGLLPAKYRFREEAATVV

SEQ ID NO: 1040 - protein, 395 aa, Triticum aestivum
MVSLGQKPTVTTYSILLHGYAMEQSFHEMHCLIDLMVGNGIAPNHFVYNILISAYAQEETVGEVMHIFTKMRQEGLNPDVANYGAVINLLSSIGRMDDAMSQYNQMITEGLLPGIIVFTPLISGFCSCGKWEKVDELFSEMLDRGICPDTVFFNTVMDHLCKNGRVIEAQDLFDLMVHMGVKPFVRDYNTLIHGYCLVGKMDEGRKLLDNMCSIGLKPDDFTYSILIDGYSMKGRIGDALIVVREMLDRKVKPSIITFNIMIGALLKGGRKEEAKDLFDGIWAKGLVPDVVTYRLMIQKLIEEGSLQDSDDLFLSMEKNGCVADSRMLNAIVRSLLQKGDVPRAGTYLSKIDERRFTFEASTASLLTSLASGGKGQEYKELLPEEYHSFLEQGTG

SEQ ID NO: 1041 - protein, 395 aa, Triticum aestivum; identical to SEQ ID NO: 1040

SEQ ID NO: 1042 - protein, 395 aa, Triticum aestivum; identical to SEQ ID NO: 1040

SEQ ID NO: 1043 - protein, 374 aa, Triticum aestivum
MEQSFHEMHCLIDLMVGNGIAPNHFVYNILISAYAQEETVGEVMHIFTKMQQEGLNPDVANYGAVINLLSSIGRMDDAMSQYNQMITEGLLPGIIVFTPLISGFCSCGKWEKVDELFSEMLDRGICPDTVFFNTVMDHLCKNGRVIEAQDLFDLMVNMGVKPFVRDYNTLIHGYCLVGKMDEGRKLLDNMCSIGLKPDDFTYSILIDGYSMKGRIGDALIVVREMLDGKVKPSIITFNIMIGALLKGGRKEEAKDLFDGIWAKGLVPDVVTYRLMIQKLIEEGSLQESDDLFLSMEKNGCVADSRMLNAIVRSLLQKGDVPRAGTYLSKIDERRFTFEASTASLLTALASGGKGQEYKELLPEEYHSFLEQGTG

SEQ ID NO: 1044 - protein, 374 aa, Triticum aestivum
MSRLRLLRRSSSSTTLIPRLRLLRRCSTSTSTSPPSGPWSPRDAFVAAIERVRAGTLSPEDAHHLFDDLLGQATPVPDRTMNGVLARATSPAACIRDGPALAVALFNRVCREEAGPHVAAPTVHTYGILMDCCCRARRPDLGLALFGRFLRTGLKANEIVATTFLKCLCCAKRTEEAVKVLLHRMPELGCVPNAISYSIVLKSLCENSMSQQALDLLQMATKEGGCLPDVVAYSAIIHGFFKEGEIDKACHLFHEMMRQGVVPTVVTYNIIIDALCKAGEMDKAELVFQRMARNGARPNKATCNGSKFSSLTDGYCSVAKMDKTFKLLDAMISVGIEPDAVTYSALLDGYFKNGRIDDGLTLFREMSCELNLQL

SEQ ID NO: 1045 - protein, 374 aa, Triticum aestivum; identical to SEQ ID NO: 1044

SEQ ID NO: 1046 - protein, 374 aa, Triticum aestivum
MSRLRLLRRSSSSTTLIPRLRLLRRYSTSTSTSPPSGPWSPRDAFVAAIERVRAGTLSPEDAHHLFDDLLGQATPVPDRTMNGVLARATSPAACIRDGPALAVALFNRVCREEAGPHVAAPTVHTYGILMDCCCRARRPDLGLALFGRFLRTGLKANEIVATTFLKCLCCAKRTEEAVKVLLHRMPELGCVPNAISYSIVLKSLCENSMSQQALDLLQMATKEGGCLPDVVAYSAIIHGFFKEGEIDKACHLFHEMMRQGVVPTVVTYNIIIDALCKAGEMDKAELVFQRMARNGAQPNKATCNGSKFSSLTDGYCSVAKMDKTFKLLDAMISVGIEPDAVTYSALLDGYFKNGRIDDGLTLFREMSCELNLQL

SEQ ID NO: 1047 - protein, 374 aa, Triticum aestivum; identical to SEQ ID NO: 1044

SEQ ID NO: 1048 - protein, 374 aa, Triticum aestivum; identical to SEQ ID NO: 1044

SEQ ID NO: 1049 - protein, 374 aa, Triticum aestivum; identical to SEQ ID NO: 1044

SEQ ID NO: 1050 - protein, 374 aa, Triticum aestivum; identical to SEQ ID NO: 1044

SEQ ID NO: 1051 - protein, 351 aa, Triticum aestivum
MKLKMPGPGGIITLVSNPYIALRAENKTAALALEALSEALAAEELTALRSTVNRDDVILDKRSKSTSFKPADEIVKFQVHPTDPTKTTSIRAQLNPVVDAALREFLRENWDIFAWHPSDMPGIPRRLAEHSLNILKGVINNLSKEGNVKDAQDMFDFIVGIGHQPDVIMYNSLMDGYCLVGKVEEAMTVLDAMKSAGLQPDAITYAILLNGYCKIGRIDDGLSLFREISLSRVKPTTIMYNIILDGLFCCGRTVFAKEEFDTMIESGIPVGIDTCTIVLSGLCKNNCTDEAIELFKKLCAMNVKFDVIILTTMISAMFKTRRIEEAKDLFATISTIGLVPSVVTYSVIFFF

SEQ ID NO: 1052 - protein, 314 aa, Triticum aestivum
MDCCCRARRPDLGPAFLGRLLRTGLKTNQIVANTLLKCLCYAKRTDEAVNVLLHKMSELGCVPDAISYNTVLKSLCEDSRSQEALDLLWMVAKEGGVGSLDVVSHSTVIHGFFKEGETGKACNLFHEMTHQGIVPNVMTYNLIIAALCKARAMDKAELILRQMVDNGVRPNTVTCSSLMSSLCKHGRSKEAAEIFDSMTAKGLKPDIVAYSILLHGYATEGCLADMIDLFNSMKNNGIEATCQVFNILIGAYAKCGMMDEAMLIFTEMRRQGVSPDVFTYTTVIVSLFRTSRLADAIDKFDEMIAIGVQPNRPV

SEQ ID NO: 1053 - protein, 314 aa, Triticum aestivum; identical to SEQ ID NO: 1052

SEQ ID NO: 1054 - protein, 314 aa, Triticum aestivum
MDCCCRARRPDLGPAFLGRLLRTGLKTNQIVANTLLKCLCYAKRTDEAVNVLLHKMSELGCVPDAISYNTVLKSLCEDSRSQEALDLLWTVAKEGGVGSLDVVSHSTVIHGFFKEGETGKACNLFHEMTHQGIVPNVMTYNLIIAALCKARAMDKAELILRQMVDNGVRPDTVTCSSLMSSLCKHGRSKEAAEIFDSMTAKGLKPDIVAYSILLHGYATEGCLADMIDLFNSMKNNGIEATCQVFNILIGAYAKCGMMDEAMLIFTEMRRQGVSPDVFTYTTVIVSLCRTSRLADAIDKFDEMIAIGVQPNRPV

SEQ ID NO: 1055 - protein, 314 aa, Triticum aestivum; identical to SEQ ID NO: 1052

SEQ ID NO: 1056 - protein, 314 aa, Triticum aestivum; identical to SEQ ID NO: 1052

SEQ ID NO: 1057 - protein, 259 aa, Triticum aestivum
MSELGCVPDAISYNTVLKSLCEDSRSQEALDLLWTVAKEGGVGSLDVVSHSTVIHGFFKEGETGKACNLFHEMTHQGIVPNVMTYNLIIAALCKARAMDKAELILRQMVDNGVRPDTVTCSSLMSSLCKHGRSKEAAEIFDSMTAKGLKPDIVAYSILLHGYATEGCLADMIDLFNSMKNDGIEATCQVFNILIGAYAKCGMMDEAMLIFTEMRRQGVSPDVFTYTTVIVSLFRTSRLADAIDKFDEMIAIGVQPNRPV

SEQ ID NO: 1058 - protein, 314 aa, Triticum aestivum; identical to SEQ ID NO: 1052

SEQ ID NO: 1059 - protein, 366 aa, Triticum aestivum
MCKAGAMDKTELVLRPMVDNGVRPDKMICNSMIHGYSTLGRWKEAGKVFREMTSRGLIPDIFTWNSFMGSLCKHGRSKEAAEIFFSMAAKGHKPNIVSYILLLRVYANEGRFADMMSLLNLMEGDGIVANCQIFTILIDAYAKQGMIDEAMLVLTDMRGQGLSPDVFTYSALLSALCRMGRLADAMDKFTQMIGTGVQPNTVVYHSLVQGLCTHGDLAKAKELVSKMMNKGIARPNIALFSSIMASLCNEGRVMDAHHIFDLVTDIGEKPNIIMFTTLIDGYCLVGKMDKACGVLDAMVSAGIEPNVVTYSTLVSGYCKNGRIDNGLILFRDMLRTAAAKKMFREIIESRIIVSISTYNIILGMTL

SEQ ID NO: 1060 - protein, 366 aa, Triticum aestivum; identical to SEQ ID NO: 1059

SEQ ID NO: 1061 - protein, 366 aa, Triticum aestivum; identical to SEQ ID NO: 1059

SEQ ID NO: 1062 - protein, 366 aa, Triticum aestivum; identical to SEQ ID NO: 1059

SEQ ID NO: 1063 - protein, 366 aa, Triticum aestivum
MCKAGAMDKTELVLRPMVDNGVRPDKMICNSMIHGYSTLGRWKEAGKVFREMTSRGLIPDIFTWNSFMGSLCKHGRSKEAAEIFFSMAAKGHKPNIVSYILLLRVYANEGRFADMMSLLNLMEGDGIVANCQIFTILIDAYAKQGMVDEAMLVLTDMRGQGLSPDVFTYSALLSALCRMGRLADAMDKFTQMIGTGVQPNTVVYHSLVQGLCTHGDLAKAKELVSKMMNKGIARPNIALFSSIMASLCNEGRVMDAHHIFDLVTDIGEKPNIIMFTTLIDGYCLVGKMDKACGVLDAMVSAGIEPNVVTYSTLVSGYCKNGRIDNGLILFRDMLRTAAAKKMFREIIESRIIVSISTYNIILGMTL

SEQ ID NO: 1064 - protein, 366 aa, Triticum aestivum; identical to SEQ ID NO: 1059

SEQ ID NO: 1065 - protein, 375 aa, Triticum aestivum
MPRLRRFSTVPMLHLLRRSSSSTSTSLPSHPWSPHEAFAAATERVRAGTLTPEEAHNLFDGFPGPQPLPERLPCRPRPCAGLRNLPQRWPCPRPCPLQPRMPRRSRPAGGILMGCFCGAHRPDLGLALFGRFLGTGLKTNKIVATTFLKCLCYAKRTDEAVNLLLRRMPELGCVPDAISYTIVLKSLCENSMSQRALDLLQMVAEGGGACSLNVVVYSTVIHGFFKEGETGKACNLFHEMIHQGVVPNVVTYSSIIDALCKARAMDKAELVLQQMVDSGAQPNNVTYNCMIHGYSTSGQLKEAAKMFRKMTSHGLVPNAVTCSSLMTSLCKHGRSKEAAEIFYSMTAKGHKPDAVSYRILLHGYANEGCFADMID

SEQ ID NO: 1066 - protein, 389 aa, Triticum aestivum
MFDVYKKCAKRREELLLGRPLVHTSVGLEMTSSPMCRIGLRHRRSSSSTSLMSRLRLLGRSSSSTSTSPRSRPWSPHAAFAAATQRVSAGTFSPEHAHQLFDELLRQGTPVPDFSLDGFLAALARATSSAACRDGPALALALFNRLCREEAGPRVAQPTIFTYGVLMNCCVRTRRPQLGLAFFGRVLRTDLKTNTIVFSSLLKCLCHAKRTDEDVSVLLHRMPELGCVPDAFSYTIVLKSLCDDSSSQRALDLLQTMEKGGGVCSPDVVSYTTVIHGLLKEGEVSKACSLFDEMVQQGVVPNVVTYSSIIDALCKAGVMDKTELVLRQMVDSGIQPDNVTYTSMIHGYSTLGRWKEADKPGYHTRCCYLDLIHDLPLQAWKKQRSCRNY

SEQ ID NO: 1067 - protein, 344 aa, Triticum aestivum
MKRTEEALNVLLHKMPNDLPNVISYSVILKSFCDNGRSQLALDLLQMMAKKGADHSPDVMSYNMVIDGFFKEGEVSKACDLFQEMIRQGIVPTEVTYSSIINALCKARAMDKAEVVLRSMVHNGAQPDAVTYNSLIQGYSTLGQLKEVARLLKVMRSQGVMPSVVTYNLLMTCLCKHGKTKEAEKIFYSMAVNGRKPDVISYSILLHGYAKEGSLIDMIDLCERMARDGVVPNLHCFNILINAYAKHGMMGVALLFFEDMLKQGVKPSEFTYLTVISAFCKMGRMDDAMEKFREMIDMGVPVDTEVYMCIVEGYFKNGDSVKAKDFITKMKNKDIPNRPQKGNY

SEQ ID NO: 1068 - protein, 344 aa, Triticum aestivum; identical to SEQ ID NO: 1067

SEQ ID NO: 1069 - protein, 344 aa, Triticum aestivum; identical to SEQ ID NO: 1067

SEQ ID NO: 1070 - protein, 344 aa, Triticum aestivum; identical to SEQ ID NO: 1067

SEQ ID NO: 1071 - protein, 344 aa, Triticum aestivum; identical to SEQ ID NO: 1067

SEQ ID NO: 1072 - protein, 267 aa, Triticum aestivum
MKRTEEALNVLLHKMPNDLPNVISYSVILKSFYDNGRSQLALDLLQMMAKKGADHSPDVMSYNMVIDGFFKEGEVSKACDLFQEMIRQGIVPTEVTYSSIINALCKARAMDKAEVVLRSMVHNGAQPDAVTYNSLIQGYSTLGQLKEVARLLKVMRSQGVMPSVVTYNSLMTCLCKHGKTKEAEKIFYSMAVNGRKPDVISYSILLHGYAKEGSLIDMIDLYERMARDGVVPNLHCFNILINAYAKHGMMDVALLFFEDMLKQGDEA

SEQ ID NO: 1073 - protein, 251 aa, Triticum aestivum
MSTARLCSTFTSSLKAPSRKPRAPRLAALAAATERVRAGTLTRQDAHKLFDKLLSQAATVPVRKLNNFLAALARAPPSAACSDGPGLAIALFNRMSRGAGARVASPTLCTYSILMDCCCRAGRPDLVLAFFSRLLRLGLSLNVISFSNLLKGLCQAKRSNEALDMLLHRTPELHCAPDVFSYNIVINGCLKEGEVDKACNLFHEMPQLGVQPDVVTYTSIMDALSKSGAMDKAEVLLRQMVDQGIEPNIKT

SEQ ID NO: 1074 - protein, 305 aa, Triticum aestivum
MGHVIKLGFTAEAIVNFNHLLKAICAEKKTSYAMDIVLRVMPEFNCTPNIFSYYILFKGLCNEKRSQEALELIQIMVEDGGCCRPDVVTYSTVIDGLLKEGEVDQAYSLFSEMLRQGVSPNIVTCNSIISGMCKLHAMDKAEEVLQQMFDRRILPDVATYTSLIHGYYSLGQCKEVDRILNEMCKHGVQPDIVTYNIQMDYLCKSGRCAEARNLLDSLIGLGQKPDVTTYSILLHGYAMEKSFDEMHCLIDLMVGNGVAPDHHIYNILISAYAKEETVGEVMDIFTKMRQQGLNPDVERIACSGD

SEQ ID NO: 1075 - protein, 305 aa, Triticum aestivum; identical to SEQ ID NO: 1074

SEQ ID NO: 1076 - protein, 305 aa, Triticum aestivum; identical to SEQ ID NO: 1074

SEQ ID NO: 1077 - protein, 329 aa, Triticum aestivum
MFEMMNGGILRPNIVFFNSVINSLYKEGRVMDAHDVLDLVIGIGERPDTITFSSLIDGYCLVGKTDKAFKILDAMESVGVEPDIVTYNTLLDGYFKNRRIDDALTLFREMPRKRIKPGTVTYGIMLDGLFRAGRTVAAKKMFHEMNESGTTVDISTYAIILGGFCRNNCADEAITLFHKLGAMNVKFNIAIVNTMINAMYKVGRREEAKELFAGILARGLVPNESTYGVMIKNLLKDGAVEDANNVFSSMDKSGIVPSSRLINDIIRLLLEKGEIAKAGYYLSKVDGKSISLEASTTSLMFSLFSRKGKYKENMKLLPAKYQFFDVLVD

SEQ ID NO: 1078 - protein, 304 aa, Triticum aestivum
MFEMMNGGILRPNIVFFNSVINSLYKEGRVMDAHDVLDLVIGIGERPDTITFSSLIDGYCLVGKTDKAFKILDAMESVGVEPDIVTYNTLLDGYFKNRRIDDALTLFREMPRKRIKPGTVTYGIMLDGLFRAGRTVAAKKMFHEMNESGTTVDISTYAIILGGFCRNNCADEAITLFHKLGAMNVKFNIAIVNTMINAMYKVGRREEAKELFAGILARGLVPNESTYGVMIKNLLKDGAVEDANNVFSSMDKSGIVPSSRLINDIIRLLLEKGNEKNSALQNIARPFSKCYTSYSALIACYISK

SEQ ID NO: 1079 - protein, 334 aa, Triticum aestivum
MNRSRAMKGLTAARRVTASVETTALSGLLSMTPEEACHRQVLDLVIGIGERPDTITFSSLIDGYCLVGKTEKAFKILDAMESVGVEPDIVTYNTLLDGYFKNRRIDDALTLFREMPRKRIKPGTVTYGIMLDGLFRAGRTVAAKKMFHEMNESGTTVDISTYAIILGGFCRNNCADEAITLFHKLGAMNVKFNIAIVNTMINAMYKVGRREEAKELFAGILARGLVPNESTYGVMIKNLLKDGAVEDANNVFSSMDKSGIVPSSRLINDIIRLLLEKGEIAKAGYYLSKVDGKSISLEASTTSLMFSLFSRKGKYKENMKLLPAKYQFFDVLVD

SEQ ID NO: 1080 - protein, 329 aa, Triticum aestivum; identical to SEQ ID NO: 1077

SEQ ID NO: 1081 - protein, 329 aa, Triticum aestivum; identical to SEQ ID NO: 1077

SEQ ID NO: 1082 - protein, 236 aa, Triticum aestivum
MDCCCRAHRLDLAFAFFGRLLRTGLKAGVIQVCTLLKGLCRAKRADEALDVLLHRMPELGGCTPNVVAYTTVIHGFFKEGQISKACYLFHEMALQGVTPDVVTYSSVIDALCKARAMDKAEYFLRQMVHNGVLPNNVTYNSLIHGYSSSGHWKEAVRVLKEMTSQGIIPDIVSYRILLHGYATEGCLVDMINLFNSMARYCILPDCHIFNILINAYAKSGKLDKAMLIFKECRNKE

SEQ ID NO: 1083 - protein, 315 aa, Triticum aestivum
MARLCYTTPMPHLRRCCSSSTSPPSRHWDPRPAFAAATERVRAGTLSPEDAHHLFDELLLQANPVPERSFNDFLAALARALSSAALRDGHSLALGIFNRVCREEAGPCVTPPTVCTYNILMDSCCRACHPNLGPAFFGRFLRTGLKADQIVAINLLKCLCHAKRKDEAVNMLLHRMSEFGCVPDAISYSIVLKSLCDDSRSQQALDLLQMVRKGGACSLDVVAYSTVIRSFFKEGEVSKACNLFHEMVQQGIVPNVVTYSLIIDALCKVRAMDKAKLVLQQMVDNGVRPNMYTCMELIHVLPLQEWRKQRSCRIF

SEQ ID NO: 1084 - protein, 315 aa, Triticum aestivum; identical to SEQ ID NO: 1083

SEQ ID NO: 1085 - protein, 315 aa, Triticum aestivum; identical to SEQ ID NO: 1083

SEQ ID NO: 1086 - protein, 315 aa, Triticum aestivum; identical to SEQ ID NO: 1083

SEQ ID NO: 1087 - protein, 315 aa, Triticum aestivum
MARLCYTTPMPHLRRCCSSYTSPPSRHWDPRPAFAAATERVRAGTLSPEDAHHLFDELLLQANPVPERSFNDFLAALAQALSSAALRDGHSLALGIFNRVCREEAGPCVTPPTVCTYNILMDSCCRACHPNLGPAFFGRFLRTGLKADQIVAINLLKCLCHAKRKDEAVNMLLHRMSEFGCVPDAISYSIVLKSLCDDSRSQQALDLLQMVRKGGACSLDVVAYSTVIRSFFKEGEVSKACNLFHEMVQQGIVPNVVTYRLIIDALCKVRAMDKAKLVLQQMVDNGVRPNMYTCMELIHVPPLQEWRKQRSCRIF

SEQ ID NO: 1088 - protein, 315 aa, Triticum aestivum; identical to SEQ ID NO: 1083

SEQ ID NO: 1089 - protein, 315 aa, Triticum aestivum; identical to SEQ ID NO: 1083

SEQ ID NO: 1090 - protein, 360 aa, Triticum aestivum
MTAKGHRANVVSYCILLHGYGNEGCFADMIDLFNSMERNGIAADCRVFNILIDAYAKHGMTDEAMLIFTEMREKGAGPDAFTYSTVIAALSRMGRLTDAMGKFSQMIAMGVQPDTTVYHSLIQGCCLHGDLVKAKELVCEMMNKGIPRPSIVFFNSVINSLCKEGRIMDAHDIFDLVIDIGERPDAITFSSLIDGYCLVGNMDKALKVLDVMESVGVEPNVITYNTLVNGYCRNGRIDDSLTLFREMPRKRIKPDTVSYCIIMNGLFRAGRTVAARKMFHEMTENGITVSISTYSIILRGLCRNNCADEAITLFQKLGTMNVKFDIAILNTMINAMYKGSKKGRSKGIVCYNISQWVGAQ

SEQ ID NO: 1091 - protein, 334 aa, Triticum aestivum
MASVGVQPNAVTLNSLIDSLCKHRRTKEAREIFDSMAAKGLKPNIVSYSTMLNGYVKEGCFDDMTDLFNSMVRNGIVPNHHIFNILINAYAKRGVMDEAMHMFEVMRQQGVNPDVFSYQIVMDSLRKMGRMDAALDKFNQMVNQGVSPNIVVYQCLVLGSCSHGDFVKAKELISEAVNRGLCSNSVFFYSVINDLCKEGKVKEAQDMFHFIVGIGQRPDVIMYTSLMDGYCLVGKVEEALRVLGAMKSAGLQPTAVTYGILLNGYCKIGRIAAGLSLFKEMSLSGVKPTTIFFRENAKEFAFHFIEQEENSSTGTTSQKEGHTHTHHRPHQTSR

SEQ ID NO: 1092 - protein, 381 aa, Triticum aestivum
MLFAKKGRLDDAVIKFNQMIDAGVRPDASVYRSLIQGFCTHGDLVKAKEYVTEMMKKGMLPPDIMFFSSIMQKLCTEGRVIEARDILDLIVRIGIRPDVFIFNILIGGYCLVRKMADASKIFDDMVSYGLEPCNSTYGILINGYCKNGRIDDGLILFKEMLPKGLKPTTFNYNVILDGLFLAGQTVAAKEKFDEMVESGVSVCIDTYSIVLGGLCRNNCAGEAITLFQKLSTTNVKFDIRIVNIMIDAFYRVRRNQEAKDLFAAVSANGLVANVFTYTVMMINLIEEGSLEEADTLFLSMERSGCTANSYMLNHIIRRLLERGEIVKAGNYMSKVDAKSYSLEAKTVSLLISLFLGKGRYREHMKLLPMKYQFLEEAATVE

SEQ ID NO: 1093 - protein, 381 aa, Triticum aestivum; identical to SEQ ID NO: 1092

SEQ ID NO: 1094 - protein, 381 aa, Triticum aestivum; identical to SEQ ID NO: 1092

SEQ ID NO: 1095 - protein, 381 aa, Triticum aestivum; identical to SEQ ID NO: 1092

SEQ ID NO: 1096 - protein, 333 aa, Triticum aestivum
MVDEVMHIFTKMRQQGLNPDVENYGAVVNLLSKIGRMDDAMSQFNQMITEGLAPDVIVFTPLISGFCSCGKWEKVDELFSEMLDRGICPDTVFFNTVMDHLCKNGRVIEAQDVFDLMVHMGVKPDVRSHVTLMHGYFADGKMDEMRKLLENMCSIGLKPDVVTYSILIDSYSKNGRIDDALVVFREMLDGVKPSIITFNIMIGVLLKGSRKEEAKDLFDGIWAKGLVPDVVTYSLMIQNLIEEGSLQESDDLFISMEKNGCAANSCMLNAIVRSLLQKEEILRAGTYLSKIDERRFTLEASTASLLTALVSGGEGQEYKELLHEKYSELLIEA

SEQ ID NO: 1097 - protein, 375 aa, Triticum aestivum
MTAKGLKPDIVVYCTLLHGYATEGCLADMINLFNSMEDNGIVANCKVFTILIDGYAKCGMIDEAMLIFTKMREQGVSPNVFTYAIVTAALCRMGRLSDAMDKLNEMIAMGLQPNKVVYRSLIQGFCTHGDLVKAKVLVSEMMNKGIPRPNMVFFNSVINSLCKEGRVTDAHDIFDLAINIGERPDVITFNSLIDGHCLAGKMDKAFGVLDAMVSAGIEPNVVTYNTLIDGYSRKGRIDDGLTLFREMMPNKIKPTTATYGAILHGLFRAGRTSPAKKMFNEMIESETTVNISIYAIILGGLCRNNCVDEAIVLFEKLGAMNVKLDVGIFNTMINAMYAVKGREEAKDLFAAISANGLVPNASSYGVMITNLLRED

SEQ ID NO: 1098 - protein, 360 aa, Triticum aestivum
MSRRFVPVDRRILERNIKARYHAGDIGTQDALHLFDELIQVAGPSSVRAINCLLTVVGRDCPALGVSLFNRVARTKVPPHNVTYGILVDCCCRAGRLDLGHAAMGRVIKLGFTAEAIVNFSHLLKAICAEKKTSYAMDIVLRIMPEFNCMPNIFSYNILFKGLCNEKRSQEALDLIQIMVEDGGCCRPDVVTYSTVIDGLLKEGEVGKAYRLFSEMLQRGISPNAVTYSSIICGMCRLHLMDKAEEVLQQMFDREILPDVATYTSLIHGYYSLGQCEEVDRIFKEMSRNGVQPDIVTYNIQMDYLCKNGRCAEARKIFDSMVSLGQKPTVTTYSILLHGYAIERFLIPCPGVDPLVGQLG

SEQ ID NO: 1099 - protein, 342 aa, Triticum aestivum
MSRIHLHRCLYSSTSRPLRSWSPRAAFAAATERVRAGALSQDDAHHLFDELLRQATPVPGRSLNGFLAALARAPASEVCRDGPALALALFNRVCRDEAGAPLTVHTYGILMGCCCRGHRPDLGLALFGRLHRTGIKTNQIAVNTFLKCLCYAKRTDEAVNVLLHRMSELGCVPNAFSYSIVLKSLCYNSMSQRALDLLQMMAKEGGACSPNVVTYTTVIHGLFKEGETGKACNLFHEMKQQGIEPNVVTYTSSIDALCKARAMDKAELVLRQMVANGAQPNEVTYNCMIHGYSTSGQLKEAAKMFREMTSQGLIPDNFTCSSLMTSLCKHQRSKEAAEIFMP

SEQ ID NO: 1100 - protein, 374 aa, Triticum aestivum
MGRMDAALDKFNQMVNQGVSPNKAVYQCLVLGSCSHGHFVKAKELISEAVNRGLCSNSVFFYPVINDLCKEGKVKEAQDMFDFIVGIGQRPDVIMYNSLMDGYCLVGKVEEALRVLDAMKSAGLQPTAVTYGILLNGYCKIGRIAAGLSLFMEMSLSGVKPTTIMYNIILDGLFRSGRTDSAKEKFRTMSESGIPVGIDTYNIVLSGLCKNNCAGEAIELFKKLRAMNVKIDVKTLTIMISAMFKSRRIEEAKELFATISAIGLVPSVVTYSVMMTNFIKEGSLAETDDMFLAMEKASCAPDSILLNQVVRALLEKGAVVKAATYLAKLDAKQLSVEASTISLIVSLFSGEGKLREHVELLPVKYQPPESSTDN

SEQ ID NO: 1101 - protein, 295 aa, Triticum aestivum
MFDFIVGIGQRPDVIMYNSLMDGYCLVGKVEEALRVLDAMKSAGLQPTAVTYGILLNGYCKIGRIAAGLSLFMEMSLSGVKPTTIMYNIILDGLFRSGRTDSAKEKFRTMSESGIPVGIDTYNIVLSGLCKNNCAGEAIELFKKLRAMNVKIDVKTLTIMISAMFKSRRIEEAKELFATISAIGLVPSVVTYSVMMTNFIKEGSLAETDDMFLAMEKASCAPDSILLNQVVRALLEKGAVVKAATYLAKLDAKQLSVEASTISLIVSLFSGEGKLREHVELLPVKYQPPESSTDN

SEQ ID NO: 1102 - protein, 374 aa, Triticum aestivum; identical to SEQ ID NO: 1100

SEQ ID NO: 1103 - protein, 370 aa, Triticum aestivum
MISLGVVPNAIMWNSFMDSLCKHRRTKEARDIFDSMAAKGQKPDIFSYSTMLNGYAKEGCFDDMTCLLNLMLQNGVVPNHHIFNILINAYAKPGLMDEAMHMFEVMRQQGVNPDVFDYQIIMDSLYKMGRMDATLDKFNQMVNQGVSPNKAVYQCLVLGSCFHGHFLKAKELISEAVNRGMCSNSMFFYPVINDLCKGKVEEAQDIFDFILGIGQRPDVTMYNSLMDGYCLVGKVEEALRVLDAMKSAGLQPDAITYAILLNGYCKIGKITDGLSLFREMSLSGVKPTTIMYNIILDGLFCSGRTVSAKEKFNTMVESGLPVDVCTYNIVLCGLYKNNCTGEAIELFKKLRAINMKIDVIILNTIISLIF

SEQ ID NO: 1104 - protein, 351 aa, Triticum aestivum
MEKSFHDMHCLIDLMVENGIAPDHHVYNILISACAQEEMVSDVMHIFTKMRQQGLNPNVANYGVVVNLLCSMGRMDDAMYQYNQMITEGLDPDIIVFSTLISGFCSCGAWERVHEIFSEMLNRGIYPDTVFFNIIMDHLCKEGRVMEAQDIFDLMVHMGVKPFVRDYNTLIHGYCLVGKMDEGRKLLDNMCSIGLKPDDFTYSILIDGYSMKGRIDDALIVVRELLDGKVGPSIITFNIMIVALLKGGRKEEAKDLFDGIWAKGLVPDVVTYSLMIQKLIEEGSLQESDDLFLSMEKNGCAADSRMLNDIVRSLLQKGTMQVSMEYATEASLARLPFKIYHALREATKMPS

SEQ ID NO: 1105 - protein, 225 aa, Triticum aestivum
MMSKGIPRPNIVFFNSVINYLCKEGRVMDAQDIFEFIISIDERPDVITFNSLIDGYCLVSKMDKASGVLDAMVSAGIEPNVVTYNTLVSGYSINRRIDDGLTLFRQMPLKRIKPDSVTYGIILDGFFRAGRTVAARKMFHEMIERGIPVTISIYNRILGGLCRNNCADEAIALFQKLGAMNVKFDIITLNTMINACSRFEEEKKLTICLLQYQPVGWCLMLLLTA

SEQ ID NO: 1106 - protein, 325 aa, Triticum aestivum
MMSKGIPRPNIVFFNSVINYLCKEGRVMDAQDIFEFIISIDERPDVITFNSLIDGYCLVSKMDKASGVLDAMVSAGIEPNVVTYNTLVSGYSINRRIDDGLTLFRQMPLKRIKPDSVTYGIILDGFFRAGRTVAARKMFHEMIERGIPVTISIYNRILGDLCRNNCADEAIALFQKLGAMNVKFDIITLNTMINAMFKVRRREEANDLFAAISASGLVPNASTYGIMIKNILKEGSVEEIDNMFSSMEKSGIVPSSHLINDIIRMLLEKGEIARAGYYLLKVDGKNTLLEASTTSLMLSLFSREGKYQEDVKLLPAKYQFFYGFG

SEQ ID NO: 1107 - protein, 325 aa, Triticum aestivum; identical to SEQ ID NO: 1106

SEQ ID NO: 1108 - protein, 225 aa, Triticum aestivum; identical to SEQ ID NO: 1105

SEQ ID NO: 1109 - protein, 325 aa, Triticum aestivum; identical to SEQ ID NO: 1106

SEQ ID NO: 1110 - protein, 325 aa, Triticum aestivum; identical to SEQ ID NO: 1106

SEQ ID NO: 1111 - protein, 358 aa, Triticum aestivum
MIMVFHQIIMATTYSYLLMLKKKMVDDVLHIFTKMRQQGLNPDVANYGAVINLLSSIGRMDDAMSQYNQMINEGLAPDIIVFNSLISGFCSCGKWEKVHELFSEMLDRGICPNTVFFTTIMDRLCKNGRVMEAQDLFDLMVHMGVKPDVWTYNTLIGGYLFIGKMDEVSKLLDNMCSIGLKPNVFTYGILIDGYSKNGSIDDALVVIREMLDGVKPSIITFNIMIGVLLKGSRMEEAKDLFDGIWAKGLVPDVVTYSLMIQKLIEEGSLQESDDLFVSMEKNGCAADSCMLNAIVRRLLQKGEILMAGTYLSKIDERRFSFEASTASLLAALVSGGKGQEYKELLPEKYHYFLEQGTD

SEQ ID NO: 1112 - protein, 358 aa, Triticum aestivum; identical to SEQ ID NO: 1111

SEQ ID NO: 1113 - protein, 344 aa, Triticum aestivum
MAKGDDCSPCVLSYSTVIHGFFKEGEVGMACNLFHEMTQQGVVPNVVTYNSIIDAMCKAGAMDKTELVLRQMVDNGVRPDKVIYNSMIHGYSTLGRWKEAGKMFREMTSRGLIPDIFTWNSFMGSLCKHGRSKEAAEIFFSMAAKGYKTNIVSYIALLRVYANEGSFADMMSLFNSMEGNGIVANCQVFTILIDAYAKQGMIDEAMLILTDMRGQGLSPDVFTYSTLISALCRMGRLADAMDKFSQMIGMGVQPNTVVYHSLVQGLCTHGDLAKAEELVSEMMNKGIARPNKSLASSFLYHYSISGSIRRVGANPAYIRVSICQHISVCDNPAETIRCSCHPSF

SEQ ID NO: 1114 - protein, 325 aa, Triticum aestivum
MMNKGIPRPSIVFFNSVINSLCKEGRIMDAHDIFDLVIDIGERPDAITFSSLIDGYCLVGNMDKALKVLDVMESVGVEPNVITYNTLVNGYCRNGRIDDSLTLFREMPRKRIKPDTVSYCIIMNGLFRAGRTVAARKMFHEMTENGITVSISTYSIILRGLCRNNCADEAITLFQKLGTMNVKFDIAILNTMINAMYKVGRREEAKDLFAAISHSGLVPNESTYKVMIKNLLKDGAVEDADNMFSSMDNSGIVPSSLLINDIIRMLLEKGEIAKAGNYLSKVDGKSISLEASTASLMLSLFSRKGKHQEDIKLLPAKYQFFDGFG

SEQ ID NO: 1115 - protein, 325 aa, Triticum aestivum; identical to SEQ ID NO: 1114

SEQ ID NO: 1116 - protein, 325 aa, Triticum aestivum; identical to SEQ ID NO: 1114

SEQ ID NO: 1117 - protein, 325 aa, Triticum aestivum; identical to SEQ ID NO: 1114

SEQ ID NO: 1118 - protein, 325 aa, Triticum aestivum; identical to SEQ ID NO: 1114

SEQ ID NO: 1119 - protein, 325 aa, Triticum aestivum; identical to SEQ ID NO: 1114

SEQ ID NO: 1120 - protein, 253 aa, Triticum aestivum
MIIVHMVIVHMVKKTLIQGYCTHGDLVKAMGLVSEMINRGIPPPDIVFFNSVINSLCKEGRVTDAQDTFDLVIYFGERPDIFTFNSLIDGYCLVGEMEKAFGVLDTMASGGIEPDSISYNTIVNGYFKNDRIDDGLALFREMLKKVKPTTVTYNIILDGLFGAGKTVAAKKTFHEMIESGITVSISTYRIILGGLCRNSCDDEAITLFQKLGAMNVKLDITILNTMINALFKVQRREEANNLFATVSASVDCF

SEQ ID NO: 1121 - protein, 330 aa, Triticum aestivum
MRLVSEMINRGIPPPDIVFFNSVINSLCKEGRVTDAQDIFDLVTYFGERPDIFTFNSLIDGYCLVGEMEKAFGVLDTMASGGIEPDSISYNTIVNGYFKNDRIDDGLALFREMLKKVKPTTVTYNIILDGLFGAGKTVAAKKTFHEMIESGITVSISTYRIILGGLCRNSCDDEAITLFQKLGAMNVKLDITILNTMINALFKVQRREEANNLFAAVSASGLVPNAYTYCIMITNLIKEGSVEEAENMFLLMEKSSCAPDSRLINCIIRILLEKGEIVKAGNYMSKVDGKSISLEASTTSLLIHLFASKGKYQEQINLLPVKYRFFEGVS

SEQ ID NO: 1122 - protein, 330 aa, Triticum aestivum; identical to SEQ ID NO: 1121

SEQ ID NO: 1123 - protein, 330 aa, Triticum aestivum; identical to SEQ ID NO: 1121

SEQ ID NO: 1124 - protein, 253 aa, Triticum aestivum; identical to SEQ ID NO: 1120

SEQ ID NO: 1125 - protein, 330 aa, Triticum aestivum; identical to SEQ ID NO: 1121

SEQ ID NO: 1126 - protein, 324 aa, Triticum aestivum
MMNRGIPRPNIVFNSVINSLCKEGRVMDAHDVLDLVIGIGERPNVITFNSLIDGYCLVGNMDKAFKILDVMESVGVEPNVVTYSALLDGYSKNRRIDDALTLFREMPRKRIKPDTVTYGIMLDGLFRAGRTVAAMEMFHEMTESGTTVDIVIYNIILGGLCRNNCVDEAIALFQKLRAMNVKFNIEILNTMINAMYKVQRKEEAKELFATISANGLVPNESTYAVMIRNLLRGGAVEDADNMFSSMDNSGIVPSSGLINDIIRMLLKKGEIAKAGNYLSKVDGKSISLEASTTALLLSLFSRKGKHQVDIKLLPAKYQFFDGFG

SEQ ID NO: 1127 - protein, 346 aa, Triticum aestivum
MPRLQVRSFCSSFSSRAYDLLNELQGHLDSRTLRPELARQLFDEMLRQPVPVTARALNGLFAALARAPPSTACTDGPALAVDLFNHMARAGRRRMTGPTVHTYNILIDCCHRACRPDLGPAFFGCLLKTGITMSAITYSSLFKFLCDMRRTKEALNVLLHRMPDDLPNVISYSVILKSFCDSGRSQLALDLLRVMAKKGGDHSPDVMAYNMVMDGLFKEGEVSKACDLFHEMIQQGVVPNEVTYSSIINALCKARAMDKAEVILRHMVRNGVQPHDSRIYNTLIHGFLTSDQLKEAFRLLKVMRSHGSMPNVVTCTSVMDYLCKHGRIKEAEEIFYSMAVNGRNQI

SEQ ID NO: 1128 - protein, 345 aa, Triticum aestivum
MPRLQVRSFCSSFSSRAYDLLNELQGHLDSRTLRPELARQLFDEMLRQPVPVTARALNGLFAALARAPPSTACTDGPALAVDLFNHMARAGRRRMTGPTVHTYNILIDCCHRACRPDLGPAFFGCLLKTGITMSAITYSSLFKFLCDMRRTKEALNVLLHRMPDDLPNVISYSVILKSFCDSGRSQLALDLLRVMAKKGGDHSPDVMAYNMVMDGLFKEGEVSKACDLFHEMIQQGVVPNEVTYSSIINALCKARAMDKAEVILRHMVRNGVQPHDRIYNTLIHGFLTSDQLKEAFRLLKVMRSQGSMPNVVTCTSVMDYLCKHGRIKEAEEIFYSMAVNGRNQI

SEQ ID NO: 1129 - protein, 345 aa, Triticum aestivum
MPRLQVRSFCSSFSSRAYDLLNELQGHLDSRTLRPELARQLFDEMLRQPVPVSARALNGLFAALARAPPSTACTDGPALAVDLFNHMARAGRRRMTGPTVHTYNILIDCCHRACRPDLGPAFFGCLLKTGITMSAITYSSLFKFLCDMRRTKEALNVLLHRMPDDLPNVISYSVILKSFCDSGRSQLALDLLRVMAKKGGDHSPDVMAYNMVMDGLFKEGEVSKACDLFHEMIQQGVVPNEVTYSSIINALCKARAMDKAEVILRHMVRNGVQPHDRIYNTLIHGFLTSDQLKEAFRLLKVMRSQGSMPNVVTCTSVMDYLCKHGRIKEAEEIFYSMAVNGRNQI

SEQ ID NO: 1130 - protein, 345 aa, Triticum aestivum; identical to SEQ ID NO: 1128

SEQ ID NO: 1131 - protein, 345 aa, Triticum aestivum; identical to SEQ ID NO: 1129

SEQ ID NO: 1132 - protein, 301 aa, Triticum aestivum
MLRQPVPVSARALNGLFAALARAPPSTACTDGPALAVDLFNHMARAGRRRMTGPTVHTYNILIDCCHRACRPDLGPAFFGCLLKTGITMSAITYSSLFKFLCDMRRTKEALNVLLHRMPDDLPNVISYSVILKSFCDSGRSQLALDLLRVMAKKGGDHSPDVMAYNMVMDGLFKEGEVSKACDLFHEMIQQGVVPNEVTYSSIINALCKARAMDKAEVILRHMVRNGVQPHDRIYNTLIHGFLTSDQLKEAFRLLKVMRSQGSMPNVVTCTSVMDYLCKHGRIKEAEEIFYSMAVNGRNQI

SEQ ID NO: 1133 - protein, 345 aa, Triticum aestivum; identical to SEQ ID NO: 1129

SEQ ID NO: 1134 - protein, 346 aa, Triticum aestivum
MPRLQVRSFCSSFSSRAYDLLNELQGHLDSRTLRPELARQLFDEMLRQPVPVSARALNGLFAALARAPPSTACTDGPALAVDLFNHMARAGRRRMTGPTVHTYNILIDCCHRACRPDLGPAFFGCLLKTGITMSAITYSSLFKFLCDMRRTKEALNVLLHRMPDDLPNVISYSVILKSFCDSGRSQLALDLLRVMAKKGGDHSPDVMAYNMVMDGLFKEGEVSKACDLFHEMIQQGVVPNEVTYSSIINALCKARAMDKAEVILRHMVRNGVQPHDSRIYNTLIHGFLTSDQLKEAFRLLKVMRSHGSMPNVVTCTSVMDYLCKHGRIKEAEEIFYSMAVNGRNQI

SEQ ID NO: 1135 - protein, 346 aa, Triticum aestivum; identical to SEQ ID NO: 1134

SEQ ID NO: 1136 - protein, 213 aa, Triticum aestivum
MSAITYSSLFKFLCDMRRTKEALNVLLHRMPDDLPNVISYSVILKSFCDSGRSQLALDLLRVMAKKGGDHSPDVMAYNMVMDGLFKEGEVSKACDLFHEMIQQGVVPNEVTYSSIINALCKARAMDKAEVILRHMVRNGVQPHDRIYNTLIHGFLTSDQLKEAFRLLKVMRSQGSMPNVVTCTSVMDYLCKHGRIKEAEEIFYSMAVNGRNQI

SEQ ID NO: 1137 - protein, 345 aa, Triticum aestivum; identical to SEQ ID NO: 1128

SEQ ID NO: 1138 - protein, 345 aa, Triticum aestivum; identical to SEQ ID NO: 1129

SEQ ID NO: 1139 - protein, 346 aa, Triticum aestivum; identical to SEQ ID NO: 1134

SEQ ID NO: 1140 - protein, 325 aa, Triticum aestivum
MMNKGIPRPDIAFFTSIINSLCKEGRVMDAQNIFDLLVAIDERPNVITFNSLIDGYCLVGEMDKVFRVLDAMKSVGAEPDIVTYNTLVNGYCRNGRIDDDLALFREMPCKGIKPDTVAYCIILDGLFHAGRIVVARKMFHEMIESGTTVGIPIYNITLKGLSRNNCAHEAIAMFQKLGAMNVKFDIVTLNTMINALYKVGKKEEAKDLFAAISASGLVPNASTYSIMIINYLKEGSVEDANNIFSSMEKSGIAPSSRLINYIIRIYLEKGEIAKAGDYLSKVDGKNILLEASTTSLMLSLFSRNGKYQENIKLLPAKYQFFYGFG

SEQ ID NO: 1141 - protein, 325 aa, Triticum aestivum; identical to SEQ ID NO: 1140

SEQ ID NO: 1142 - protein, 325 aa, Triticum aestivum
MMNKGIPRPDIAFFTSIINSLCKEGRVMDAQNIFDLLVAIDERPNVITFNSLIDGYCLVGEMDKVFRVLDAMKSVGAEPDIVTYNTLVNGYCRNGRIDDDLALFREMPCKGIKPDTVAYCIILDGLFHAGRIVVARKMFHEMIESGTTVGIPIYNITLKGLSRNNCAHEAIAMFQKLGAMNVKFDIVTLNTMINALYKVGRKEEAKDLFAAISASGLVPNASTYSIMIINYLKEGSVEDANNIFSSMEKSGIAPSSRLINYIIRIYLEKGEIAKAGDYLSKVDGKNILLEASTTSLMLSLFSRNGKYQENIKLLPAKYQFFYGFG

SEQ ID NO: 1143 - protein, 325 aa, Triticum aestivum
MMNKGIPRPDIAFFTSIINSLCKEGRVMDAQNIFDLLVAIDERPNVITFNSLIDGYCLVGEMDKVFRVLDAMKSVGAEPDIVTYNTLVNGYCRNGRIDDDLALFREMPCKGIKPDTVAYCIILDGLFHAGRIVVARKMFHEMIESGTTVGIPIYNITLKGLSRNNCAHEAIAMFQKLGAMNVKFDIVTLNTMINALYKVGKKEEAKDLFAAISASGLVPNASTYSIMIINYLKEGSVEDANNIFSSMEKSGIAPSSRLINYIIRIYLERGEIAKAGDYLSKVDGKNILLEASTTSLMLSLFSRNGKYQENIKLLPAKYQFFYGFG

SEQ ID NO: 1144 - protein, 325 aa, Triticum aestivum; identical to SEQ ID NO: 1140

SEQ ID NO: 1145 - protein, 325 aa, Triticum aestivum; identical to SEQ ID NO: 1140

SEQ ID NO: 1146 - protein, 325 aa, Triticum aestivum; identical to SEQ ID NO: 1140

SEQ ID NO: 1147 - protein, 284 aa, Triticum aestivum
MHSNEALDLLLHRMPELDCAPDVFSFNIVINGCFREGEVDKACNLFHEMPQLGVQPDVVTYNSIIIALSRAGAMGKAEVVLRQMVDKGIGPDVMTYNSLIHGYSTLGQWKAAVRVFKEMVSVGVLPNAVTLNSFMDSLCKHRRTKEARDIFDSMAAKGHKPNIASYSTMLNGYAKQGCFDDMTGLFNSMLQNGVVPNHHIFNILINAYAKRGLMDEAMHMFEVMRQQGVNPDVFSYQIVMDSLCKWVGWMLLWTNLIRWSIKEFHLTKLFTNAWFWVLVLMVIL

SEQ ID NO: 1148 - protein, 328 aa, Triticum aestivum
MMNKGIPRPDIMFFHSIMQNLCTEGRVVEARDILGLIAHIGMRPNVCTFNILIGGYCLVRKMEDASKIFHDMMPYGLEPSNITYGILINGYCKNLRIDDGLILFKEMLRKGLKPTTLNYNIILDGLFLAGRTAAAKEKFDEMVESGADVCIDTYCIVLGGLCRNNCYSEAIMLFQKLSAMNVKFDITVVNIIIGAFYRVQRNQEAKDLFVAIPANGLVPNSVTYTIMMRNLIKEGSVEEADNLFLSMENSGCTANSNMLNLIVRMLLEKGEIVKAGNYMSKVDAKSYSLEAKTVSLLISLFSGKGKYREHIGLLPTKYQFREEAATVV

SEQ ID NO: 1149 - protein, 280 aa, Triticum aestivum
MPAARLSSFKAPSRERRPPLAALAAATERVRAGTLSRQDAHHLFDELLSQAATVPVRKLNNFLAALARAPPSAACSDGPGLAIALFNRMSRGAGARVVSPTLCTYSILMDCCCRARRPDLVVAFFGRLLRLGLRLEVISFSNLLKGLCQAKRTNEAVDLLLHRTPELDCVPDVVSYNIVINGCLKEGEVDKACNLFHEMPQLGVQPDVVTYNSIIDALSKSRAMDKAEVVLRQMVDQGIGPDVMTYTSLIHGYSTSGQWKEAVRLFKKMTSLGALPYRHV

SEQ ID NO: 1150 - protein, 330 aa, Triticum aestivum
MPDDLPNAISYSVILKSFCDSGRSQLALDLLQMMAKKGADHSPDVVAYNMVIDGFFKEGEVSKACDLFHEMIQQGVVPTVVTYNSVIDALCKARAMDKAEVVLRSMVHNGVHPNTVTYNSLIQGYSTLGQLKEVARLLKVMRSQGVMPSVVTYNSLMDYLCKHGRIKEAEEIFYSMAVNGRRPDIVSYSIMLHGYAIEGSLVEMIDLCELMARDGVVPDLRCFNILINAYAKYGRMDVAMLFFEDMLKQGVKPNEFTYLTVISAFCKMGRMDDAMEKFSEMIDIGVPLDTEVYMCMVEGYFNHGDSMKAEEFITRMKNKDINHKPWEGNR

SEQ ID NO: 1151 - protein, 330 aa, Triticum aestivum; identical to SEQ ID NO: 1150

SEQ ID NO: 1152 - protein, 330 aa, Triticum aestivum; identical to SEQ ID NO: 1150

SEQ ID NO: 1153 - protein, 330 aa, Triticum aestivum; identical to SEQ ID NO: 1150

SEQ ID NO: 1154 - protein, 250 aa, Triticum aestivum
MPAARLSSISTSSFRAPSRAPLAALAAATERVRAGTLSQDDAHHLFDQLLGQAAAVPERGLNNFLAALARAPPSAACRDGPGLAIALFNRMSRGAGARVASPTLCTYSILMDCCCRAGRPDLVLAFFGRLLRLGLRLDIISSSNLLKGLCQAKRSNEALDMLLHRMPELDCVPDVFSYSIVINGCFKQGEVDKACNLFHQMPQLGVQPNVVIYNSVIDALSKSGAMDKAEVVLGKWLIKELNPISRHITV

SEQ ID NO: 1155 - protein, 250 aa, Triticum aestivum; identical to SEQ ID NO: 1154

SEQ ID NO: 1156 - protein, 324 aa, Triticum aestivum
MLQRGISPNVVTCNSIISGMCKVHAMDKAEEVLQQMTDRGILPDVATYTSLIHGYYSLGQCKEVDRIFKEMTRNGVQPNVVTYSIQMDYLCKSGRCAEARKIFDSMVSLGQKPSVTTYSILLHGYVMEKSFHDMHCLLDFMVENGISPDHHVYNILISAYAKEEMASEVMHIFTKMRQQGLNPSVADYGAVINLLSSIGRMDDAMSQFNQMIAEGLAPDIIVFNPLISGFCTCGKWEKVHELFSEMLNRGTYHDTVFFTTIMDRLCKNGRVMESQDMFDLMVHVGVKPNVHTYATLMHGYFFVRKMDEVRKLVGNMLSIGSKPD

SEQ ID NO: 1157 - protein, 282 aa, Triticum aestivum
MALPSPRMAQAGRRQVPAPSIYTYNILIDCCHRACRPDLGPAFFGRLLNTGITMSVITYISLFKCLCDMKRTEEALNVLLHRMPDDLPNVISYSVILKSFCDSGRSQLALDLLQMMAKKGADHSPDAMSYNIVIDGFFKEGEVSKACDLFHEMMQQGVVPDMATYNSVIDALCKARAMDKAEVVLRSMVHNGVQPDVVTYNSLIQGYSTLGQLKEVARLLKVMRSQGVMPSVVTYNSLMDYLCKHGRIKEAEEILDSMAVNGRKPDLILYYAPWVRYRRIPC

SEQ ID NO: 1158 - protein, 282 aa, Triticum aestivum; identical to SEQ ID NO: 1157

SEQ ID NO: 1159 - protein, 282 aa, Triticum aestivum; identical to SEQ ID NO: 1157

SEQ ID NO: 1160 - protein, 282 aa, Triticum aestivum; identical to SEQ ID NO: 1157

SEQ ID NO: 1161 - protein, 282 aa, Triticum aestivum; identical to SEQ ID NO: 1157

SEQ ID NO: 1162 - protein, 282 aa, Triticum aestivum; identical to SEQ ID NO: 1157

SEQ ID NO: 1163 - protein, 254 aa, Triticum aestivum
MPRLRLRRFSTAPMFHLLRRSSSSTTTSPPSRSWSPHAAFAAATERISAGTLSREDAHRLFDELLRQATPVPSRSLNGFLAALARATSSAACIRDGRALAIALFNRVCREQSGPRVVPLTVHTYNILMDCCCRASRPDLGLAFFARLLRTGLKTNEITANTFLKCLCYAKRTDEALNVLLHRMSELGCVPDAISYNIVLKSLCEDSMSQRALDLLQMMAKEGGGCSPNVVAYNTVIHGFFKEGETGKDAICSMK

SEQ ID NO: 1164 - protein, 254 aa, Triticum aestivum; identical to SEQ ID NO: 1163

SEQ ID NO: 1165 - protein, 254 aa, Triticum aestivum; identical to SEQ ID NO: 1163

SEQ ID NO: 1166 - protein, 325 aa, Triticum aestivum
MRQQGLNPNVVNYGAVINLLSSIGRMDDAMSQFNQMITEGLAPDIIVFNSLISGFCSCGKWEKVHELFSEMLDRGICPDRVFFNTVMDHLCKNGRVMEAQDVFDLMVHMGVKPFVRDYNTLIHGYCLVGKMDEGRKLLDNMFSIGLKPGDFTYSILIDGYSKKGRIDDALIIVRVMLDGKVKPSIITFNIMIGALLKGGRKEEAKDLFNGIWAKGLVPDVVTYSLMIQKLIEEGSLQESDDLFLSMEKNGCAADSRMLNAIVRSLLQKGDVPRAGTYLSKIDERSFTLEGSTASLLTALASGRKGQEYKGLLPEKYHYFLEQGTD

SEQ ID NO: 1167 - protein, 319 aa, Triticum aestivum
MPRFSSTTSMSPLRLRLRLHARHSSASQPSRSQGWDPHAAFAAATQRARSGSLTPADAHHLFDELLRQANPVQERPLNNLLAAIVRAPASNACRNGPALAVALFSRISQGARRRVAQPNVFTYGVLMDCCCRARRLDLAIAFFGRLLKTGLEADLVFFSTLLKGLCHAKRSDEALDVLLHRMPELGCTPDVVVYNTVIHGFFREGQVGKACDMFHGMAQQGVAPNVVTYNSVIDALCKARAMDKAEYFLRQMVDNGVVPDNVTYNSLIHGYSSSGHQKETLRVLKEMTSQGIIPDVVTCNSLMAYLCKNGRSKEAAEFF

SEQ ID NO: 1168 - protein, 321 aa, Triticum aestivum
MPRRLPLALLPLHTKAMPRLSSTTPMSPLRLRLRARHSSSTSHSSRSWEPHTAFAAATERARSGNLTPEDAHHLFDELLRQANPVQERPLNNLLAALARAPASAACSDGLALAVNLFSRISQGARCVAHPTACTYGILMDCCCRAHRLDLAFAFFGRLLRTGLKAGVIQVCTLLKGLCHAKRTDEALNVLLHRMTELGCTPDVVAYNTVIHGFFKEGQVGKACSLFHEMAQQGVAPNLMTYTSVIDALCKAKAMDKAEYFLRQMVDNGVVPDNVTYNSLIHGYSSSGHWKEAVRVSKEMTSRRVTADVHTYNMFMTFLCKH

SEQ ID NO: 1169 - protein, 321 aa, Triticum aestivum; identical to SEQ ID NO: 1168

SEQ ID NO: 1170 - protein, 321 aa, Triticum aestivum; identical to SEQ ID NO: 1168

SEQ ID NO: 1171 - protein, 321 aa, Triticum aestivum; identical to SEQ ID NO: 1168

SEQ ID NO: 1172 - protein, 321 aa, Triticum aestivum; identical to SEQ ID NO: 1168

SEQ ID NO: 1173 - protein, 321 aa, Triticum aestivum; identical to SEQ ID NO: 1168

SEQ ID NO: 1174 - protein, 212 aa, Triticum aestivum
MDSCCRARRPDLGLAFFGRFLRTGLKADLIVASTLLKCLCHVRRTNEAVNMLLHRMSEFGCVPDAISYSIVLKSLCDNSRSQQALDLLQMVRKERGASSLNVVAYSIIIHGFFKEGEVSKACDLFHEMMQQGIVPDVVKYRSVIDALCKVRAMDKAKLVLQQMVNNGVRPNMYTWNSFMYSLCKHGRSKEAAEFFDSMVETARVLPGLGRSL

SEQ ID NO: 1175 - protein, 311 aa, Triticum aestivum
MKFSAVPSLVECLTSAGHPVSSGLSSPTRSHIRHCRKEQDLPRLTRSSSSSGSSRVNQLLNKLKDYLGSGTLRPELAHQLFVELFRQTVPVSADALNVLFSALACGLPSAACNDGPALAIALFKHMARARCRQVMAPTNHTYNTLIECCHMARRPDIGLVFFGLLLKIGITADVFTFNSLLKCLCDMKQTDEALGVLLHRMPGDMPDVISYSVIIKSFCDNGRSHRALDLLRMMTKKGYDHSPNVVSYTIIIDGLIKEGELSKACALFHEMMQQGVVPDVVTYSSIIDGLCKARALDEAEVVLRQMIDSGV

SEQ ID NO: 1176 - protein, 311 aa, Triticum aestivum; identical to SEQ ID NO: 1175

SEQ ID NO: 1177 - protein, 311 aa, Triticum aestivum; identical to SEQ ID NO: 1175

SEQ ID NO: 1178 - protein, 311 aa, Triticum aestivum; identical to SEQ ID NO: 1175

SEQ ID NO: 1179 - protein, 311 aa, Triticum aestivum; identical to SEQ ID NO: 1175

SEQ ID NO: 1180 - protein, 311 aa, Triticum aestivum; identical to SEQ ID NO: 1175

SEQ ID NO: 1181 - protein, 268 aa, Triticum aestivum
MRPCRTPLLDSTSPLSVLLLDHLHRNRPSPPPSASPPSAIWSPIAAFAAATKRARAGTLSPEDAHHLFDELLRQSIPVPNRFLNGFLAALARAPVSEACGDGPALTVALFNRLCREEAGPCVEPPTYYTYSILMDSCCRVGRPDLGLAFFGRLLKSGLKADQITASSLLMCLCDAGRTNEAVDVLLHRISELGCEPNVIPYNIVLKSLCDSSRSQRALDLLQMMAQRACCSPNVVSYNTVIQGLFKEGQVSMARTFFFYEMMGLCLMW

SEQ ID NO: 1182 - protein, 268 aa, Triticum aestivum; identical to SEQ ID NO: 1181

SEQ ID NO: 1183 - protein, 268 aa, Triticum aestivum; identical to SEQ ID NO: 1181

SEQ ID NO: 1184 - protein, 268 aa, Triticum aestivum; identical to SEQ ID NO: 1181

SEQ ID NO: 1185 - protein, 268 aa, Triticum aestivum; identical to SEQ ID NO: 1181

SEQ ID NO: 1186 - protein, 268 aa, Triticum aestivum; identical to SEQ ID NO: 1181

SEQ ID NO: 1187 - protein, 321 aa, Triticum aestivum
MDYLCKSRRCAEARTIFDSMAGKDQKPNVTSYSILLHAYAMEQSFHDMHCLIELMVENGVAPNHSVYNILIDAYAKGKMVDDVMHIFTKMRQQGLNPNAVNYGTVINLLCSIGRMDDAMLQFNQMITEELVPDIIVFNTLISGFFSCGKWEKVHELLAEMLNRGIYPDNVFFNTIMDHLCKNGRVMESQDLADLMIHMGLKPDVHTYNTLMGGYFFIGKMDEVRKLLDHMVSIGMEPDVVTYNTLIDGYFKNGMIDDALAVFSEMLDKKVKPCVITYNTVLHGLFHTGRTVAANELYLRMIDSGICVDIVTYNNSAYVVST

SEQ ID NO: 1188 - protein, 321 aa, Triticum aestivum; identical to SEQ ID NO: 1187

SEQ ID NO: 1189 - protein, 321 aa, Triticum aestivum; identical to SEQ ID NO: 1187

SEQ ID NO: 1190 - protein, 321 aa, Triticum aestivum; identical to SEQ ID NO: 1187

SEQ ID NO: 1191 - protein, 321 aa, Triticum aestivum; identical to SEQ ID NO: 1187

SEQ ID NO: 1192 - protein, 321 aa, Triticum aestivum; identical to SEQ ID NO: 1187

SEQ ID NO: 1193 - protein, 303 aa, Triticum aestivum
MLRRIRIRIRLRRRPYPSCTYPEPVLCHSSSFISAAPLLRLHQYRTTTTPMSRIHLRRRLFSSTTRPSHSWSPHAAFAAATKRVRTGALSQDDAHHLFDELLRQATPVPGRSLNGFLAALARAPASGACRDGPALALALFNRVCRDESGARVAPPTIFTYGILMNCCCRAHRPDLGLAFLARLLRTGLKADQITATTFLKCLCYAKRTDEAVNVLLHRMPELGCVPDAFAYSTVLKSLCDNSMSQRGLDLLHMMAKEGGGCSPNVVACSTVIHGFFKEGETGKACNLFHEMMQQGVEPNVWTY

SEQ ID NO: 1194 - protein, 303 aa, Triticum aestivum; identical to SEQ ID NO: 1193

SEQ ID NO: 1195 - protein, 303 aa, Triticum aestivum; identical to SEQ ID NO: 1193

SEQ ID NO: 1196 - protein, 287 aa, Triticum aestivum
MLDRGICPDTVFFNTVMDHLCKNGRVMEAQDVFDLMVHMGVKPFVYDYNTLIHGYCLVCKMDEERKLLDNMFSIGLKPDDFTYSILIDDYSKKGRIDDALIIVREMLDGKVKPSIITFNIMIGVLLKGGIKEEAKDLFDGVWAKGLVPDVVTYRLMIQKLIEEGSLQESDDLFLSMEKNGCVADSHMLNATVRSLLQKGEVPMAGTYLSKIDERRFTFEAPTASLLTALASGGKARNIRSYSLKNTTLFWNRALVETISRDFAYIFWTAIRGLNFSLWVTSPNLLFS

SEQ ID NO: 1197 - protein, 287 aa, Triticum aestivum; identical to SEQ ID NO: 1196

SEQ ID NO: 1198 - protein, 287 aa, Triticum aestivum; identical to SEQ ID NO: 1196

SEQ ID NO: 1199 - protein, 293 aa, Triticum aestivum
MFDFIVGIGQRPDVIMYNSLMDGYCLVGKVEEALRVLDAMKSAGLQPDAFTYGILLNGYCKIGRIAAGLSLFMEMSLSRVKPTTIMYNIILDGLFRSGRTVSAKEKFRTMSESGIPVGIDTYNIVLNGLCKNNCTDEAIELFKKLRATNVKIDVITFSTMISAMFKTRRIEEAKDLFATISAIGLVPSVVTYSLMMTNFIKEGLLADADDMFLAMEKAGCAPDSRLLNQVVRVFLKNGEVVKAVTYLAKLDAKQLSVEASTISLIVSLFSRKGKLREHVKLLPVKYQPPEMLG

SEQ ID NO: 1200 - protein, 293 aa, Triticum aestivum; identical to SEQ ID NO: 1199

SEQ ID NO: 1201 - protein, 293 aa, Triticum aestivum; identical to SEQ ID NO: 1199

SEQ ID NO: 1202 - protein, 293 aa, Triticum aestivum; identical to SEQ ID NO: 1199

SEQ ID NO: 1203 - protein, 293 aa, Triticum aestivum; identical to SEQ ID NO: 1199

SEQ ID NO: 1204 - protein, 293 aa, Triticum aestivum; identical to SEQ ID NO: 1199

SEQ ID NO: 1205 - protein, 284 aa, Triticum aestivum
MHGDLVKVKELIFEMTDKGIPHPNIVFFSSIMHSLCNEGRVMDAHHIFDLVIDIGERPDLITFNTLIDRYCLVSKMEEALRLLDSMVSAGIKPNVITYNTLINGYRSGRLDDGVILFREMLHTRVKPNTVTYNIILDGLFRAGRTVSAKKMFHEMIETGTAVSISTYSIVLGGLCRNNCTDEAIAFFQKLVAMNVMFNIAILNTIIKAMYTVQRREEANDLFASLPAYGLVPNAATYGVMISNLLKEGSLEEADNMFSSMEKRGCAPSSRLVMISSENYWKRGR

SEQ ID NO: 1206 - protein, 289 aa, Triticum aestivum
MPRLSSTTTTPMSPLRLRLRLRARHSASTSHSSRSWEPHAAFAAAAERARSGNLTPEDAHDLFDELLRQGNPVQERPLNKLLSALARAPASAACRNGPALAVNLFSRISQGARLRVAQPTACTYGVLMDCCCRAHRLDLTLAFFGGLLRTGLEADQVIFCTLLKGLCHAKCTDEALNVLLHRMPELGCTPNVVAYNTVIHGFFREGQVGKACNLFHEMRQQGVTPDVVTYNSVIDVLCMLVDLGSDRVKSNVKGMSQEPTFVAFDPNRIALIGGTSNRQMVLVPYCQRI

SEQ ID NO: 1207 - protein, 289 aa, Triticum aestivum; identical to SEQ ID NO: 1206

SEQ ID NO: 1208 - protein, 300 aa, Triticum aestivum
MPNVVTYSLMVGGLCKVGARDKAKLVLRHMVGNSVRPDMYTWNSFMGSLRKQGRSKEATQLFDYMAAKGHKPDVVMYSTLLHGYATEGCFTDMINRFNSMEGNGIVANSRVFNILIDAYAKRGMMHEAMLIFTEMREQRVSPDTFTYGIIIAALCRMGRLSDAMEKLNEMVATGLQPDEAVYYSLIQGFCTHDDLVKAKELVSEMMTKGIPRPNIVFFNSVIARLCKEGRVKDAHGIFDLAMNIGERPNVITFNSLIHGYSLVGKMAKAFGVLDDMESVGIEPDVVTYTTLRHGYSRNRR

SEQ ID NO: 1209 - protein, 300 aa, Triticum aestivum; identical to SEQ ID NO: 1208

SEQ ID NO: 1210 - protein, 300 aa, Triticum aestivum; identical to SEQ ID NO: 1208

SEQ ID NO: 1211 - protein, 300 aa, Triticum aestivum; identical to SEQ ID NO: 1208

SEQ ID NO: 1212 - protein, 300 aa, Triticum aestivum; identical to SEQ ID NO: 1208

SEQ ID NO: 1213 - protein, 300 aa, Triticum aestivum; identical to SEQ ID NO: 1208

SEQ ID NO: 1214 - protein, 297 aa, Triticum aestivum
MMVEDGGSCQPSVVFYNIIVYVLLKEGAMGKAYNLFCEMLQTGISPDVVTYNSIIYGMCKVHAMDMAEEVLQQMFDRGILPNYRTYNSLIHGYYSLGQCGEVDQVLREMFGNGVQPNVVTYSVQTDYLCKSGRCTEARKIFDSMTGLGQKPTVTNYNILLHGYAMERSFHDMHCLIDLMVENGIVPHHHIYHILIFACSKEKMVDEAMHIFKKMRQQGLNPNAASYGTVINLLCNIGRMDDMMLQFNQMITEGLAPDIIVFNTLLIGFCSCGKWEKVYELFSEMLNRGIYPVMCSSR

SEQ ID NO: 1215 - protein, 288 aa, Triticum aestivum
MMDEAMLIFSGMCGQGVTPESRMARLADALNKFSQMISTDIQPNTVVYHSLIQGFCAYGDSVKAKELVYEMINNGFPRPNIVFFSSIINSLCKEGKVIDAQDIFNLVVEIGESPDVTIFTSLIEGFCLVGKMEKASQVFDSMVSVGIEPNIVTYGTLVDGYCRSGRIDDGLILFRDLLHKGVKPTTITYYIILDGLFLAGRTVAAKKMFHEMIGSGTPVSLHTYDIILGGLCRNNCADEAITLFQKLVAMNVKLDITIHNTMINAMFKVQRREKANDFCCSISQWIGT

SEQ ID NO: 1216 - protein, 244 aa, Triticum aestivum
MMDEAMLIFSGMCGQGVTPESRMARLADASNKFSQMISTDIQPNTVVYHSLIQGFCAYGDSVKAKELVYEMINNGFPRPNIVFFSSIINSLCKEGKVIDAQDIFNLVVEIGESTDVTIFTSLIKGYCLVGKMEKASRVFDSMVSVGIEPNIVTYGTLVDGYCRSGRIDDGLILFRDLLHKGVKPTTITYYIILDGLFHAGRIVAAKKMFHEMIGSGTPVSLHTYDIILGGLCRNNCADEAITLF

SEQ ID NO: 1217 - protein, 288 aa, Triticum aestivum; identical to SEQ ID NO: 1215

SEQ ID NO: 1218 - protein, 288 aa, Triticum aestivum; identical to SEQ ID NO: 1215

SEQ ID NO: 1219 - protein, 244 aa, Triticum aestivum; identical to SEQ ID NO: 1216

SEQ ID NO: 1220 - protein, 288 aa, Triticum aestivum; identical to SEQ ID NO: 1215

SEQ ID NO: 1221 - protein, 292 aa, Triticum aestivum
MSRLHPRYFSSSVSSLADELLSEFQHHLGSGTLSPQLAHQLFDGLLRQPVPVSARALNGLFAALARTPPSTTCADGPARAIDLFNRMARAGRRRRVIAPTSHTYSILIECCCLARRPDLGPSFFAHLLKTGVTADVVIFSGLFKCLCDMKRTEEALDVLLHRVPHDLPNVISYSVIVKSLCDNGRSQLALDLLHIMAKKGADHSPNVVSYNMVIDGFFKEGETSKACDLLQEMIQQGVVPDVVMYSSIIDALCKARAMDKAEVVLRQMVHDGDVTAARSFDESGDNYRFGGF

SEQ ID NO: 1222 - protein, 234 aa, Triticum aestivum
MDKAELILRHMVHSGVQPHDRIYNTLIHGFLTLGQQKEAFRLLELMTSQGVMPNVVTCNSVMDYLCKHGRVKEAAEIFYSMVVKGQKPNVISYSVMLHGYAKEGSLVAMIDLCELMARDGVVPDRSFFNILIKAYAKYGMIDVAMLFFDEMLKQGVNPNDITYLTLISAFCKMGRMDDAMIKFNEMIDMGIPHDTTVYMCMIEGYLNHGDSVKAKEFITKMKSRDVCHSPRKGN

SEQ ID NO: 1223 - protein, 280 aa, Triticum aestivum
MVMDGFFKEGEVSKACDLFHEMIQQGVVPTEVTYSSIINALCKARAMDKAELILRHMVHSGVQPHDRIYNTLIHGFLTSGQQKEAFRLLKLMTSQGVMPNVVTCNSVMDYLCKHGRVKEAAEIFYSMVVKGQKPNVISYSVMLHGYAKEGSLVAMIDLCELMARDGVVPDRSFFNILIKAYAKYGMIDVAMLFFDEMLKQGVNPNDITYLTLISAFCKMGRMDDAMIKFNEMIDMGIPHDTTVYMCMIEGYLNHGDSVKAKEFITKMKSRDVSHSPRKGN

SEQ ID NO: 1224 - protein, 234 aa, Triticum aestivum; identical to SEQ ID NO: 1222

SEQ ID NO: 1225 - protein, 234 aa, Triticum aestivum; identical to SEQ ID NO: 1222

SEQ ID NO: 1226 - protein, 280 aa, Triticum aestivum; identical to SEQ ID NO: 1223

SEQ ID NO: 1227 - protein, 234 aa, Triticum aestivum; identical to SEQ ID NO: 1222

SEQ ID NO: 1228 - protein, 226 aa, Triticum aestivum
MPPSPLPQSVSAGTLSPKHVHHLFDKLLRQATPVPERSLNGFLAALAHAPDSSACKDGPALVLAIFNRVSREEAGLRVATPAICTYCILMDCCCRARRRDLGLAFFGRLMRTGLKTNQIAANNLLKCLCHAKRTDEAVSVLLHRMSDLGCAPNCISYNTVLKSLCEDSRSQQALDLLQMMAKEGGVCSPSLVKYNTVIHGFFKEGQVSKACNLYHEMMSKGLCLMW

SEQ ID NO: 1229 - protein, 263 aa, Triticum aestivum
MPRRLYSTRPMSYTRLCRRLSSSSTTTSSSSPSWCPHAAFATATERVRAGTLSPEHVHHLFDKLLRQATPVPERSLNGFLAALAHAPDSSACKDGPALVLAIFNRVSREEAGLRVATPAICTYCILMDCCCRARRRDLGLAFFGRLVRTGLKTNQIAANNLLKCLCHAKRTDEAVSVLLHRMSDLGCAPNCILYNTVLKSLCEDSRSQQALDLLQMMAKEGGVCSPSLVKYNTVIHGFFKEGQVSKACNLYHEMMSKGLCLMW

SEQ ID NO: 1230 - protein, 263 aa, Triticum aestivum; identical to SEQ ID NO: 1229

SEQ ID NO: 1231 - protein, 226 aa, Triticum aestivum; identical to SEQ ID NO: 1228

SEQ ID NO: 1232 - protein, 226 aa, Triticum aestivum; identical to SEQ ID NO: 1228

SEQ ID NO: 1233 - protein, 184 aa, Triticum aestivum
MSRVCLCRRLSSTSTSNTPPSPSWSPQAAFAAATERARAGTLSPQDAHHLFDELFRQATPVPERSLDGFLAALGRAASSEACRDGPSLALTLFNRLCREEAGRRVAPPTIYTYGILMNCCCRVRRPDLGLAFFGRLLRTGLKTNEVVASTLLKCLCCAKRADEAVNVLLHRMSVAVCLIPSHTT

SEQ ID NO: 1234 - protein, 280 aa, Triticum aestivum
MIHGYSTLGRWKETGKMFREMTSRGIIPDVVSWTSFMTSLCKHGRSREATGIIDYMSAKGHKPNIVSYSILFHGYATEGCFDDMINLLDSMATNGIVPNRQIFSILVDAYAKRGMMDEAMLIFTGMWEQGVIPDVSRWGQGVSPESTIFRLADALNKFSQMISIDIKPDTVVYHSLIQGFCTHGDLVKAKELVYEMINKYIPPPTVVFFSSIINSLCKEGRVTDAQDIFNLVVEIGESPDVFAFTSLLDRYCLVGKMEKASQVLMQWYQLALSLMHPPKA

SEQ ID NO: 1235 - protein, 280 aa, Triticum aestivum; identical to SEQ ID NO: 1234

SEQ ID NO: 1236 - protein, 280 aa, Triticum aestivum; identical to SEQ ID NO: 1234

SEQ ID NO: 1237 - protein, 280 aa, Triticum aestivum; identical to SEQ ID NO: 1234

SEQ ID NO: 1238 - protein, 262 aa, Triticum aestivum
MLRPELAHQLFDEMLRQPVPVSARALSGLFAALARAPPSPVCTDSPALAIDLFNLMARAGRRQATTPTIYTYIILMECCHRACRPDLGIAFFGRLLKTGIPTNIITYSSLFKCLCDMKRTEEALNVLLHKMPDDLPNVISYSVILKSFCDNGRIQLALDLLQMMAKKGADHSPDVMSYNMVIDGFFKEGEVSKACNLFQEMIRQGIVPTEVTYSSIINALCKARAMDKAEVVLRSMVHNGAQPDVVTYNSLIQGYSTLGQLK

SEQ ID NO: 1239 - protein, 249 aa, Triticum aestivum
MLRQPVPVSARALSGLFAALARAPPSPVCTDSPALAIDLFNCMARAGRRQATAPTIYTYIILMECCHRACRPDLGLAFFGRLLKTGIPTNIITYNSLFKCLCDMKRTEEALNVLLHKMPDDLPNVISYSVILKSFCDNGRIQLALDLLQMMAKKGADHSPDVMSYNMVIDGFFNEGEVSKACNLFQEMIRQGIVPTEVTYSSIINALCKARAMDKAEVVLRSMVHNGAQPDVVTYNSLIQGYSTLGQLK

SEQ ID NO: 1240 - protein, 262 aa, Triticum aestivum; identical to SEQ ID NO: 1238

SEQ ID NO: 1241 - protein, 262 aa, Triticum aestivum; identical to SEQ ID NO: 1238

SEQ ID NO: 1242 - protein, 249 aa, Triticum aestivum; identical to SEQ ID NO: 1239

SEQ ID NO: 1243 - protein, 262 aa, Triticum aestivum; identical to SEQ ID NO: 1238

SEQ ID NO: 1244 - protein, 279 aa, Triticum aestivum
MDCCCRACRPDLALAFFGRLFRTGLEANQVIFCTLLKGLCHAKRTDEALDVLLHRMPELGCTPDVVAYNTVIHGFFREGQVGKACDLFHGMAQQGVMPDVVTYSSVIDALCKARAMDKAEYFLRQMIGNGVVPNNVAYNSLIHGYSSSGHWKEAVRVFKEMTSRRVTADVHTYNMFMTFLCKHGRSKEAAGIFDTMAMKGLKPDNVSYAILLHGYATEGCLVDMINLFNSMERDCILLDCCIFSILINAYAKSGKLDKAMLLFKEMQKQGVNLHSHIQP

SEQ ID NO: 1245 - protein, 279 aa, Triticum aestivum; identical to SEQ ID NO: 1244

SEQ ID NO: 1246 - protein, 279 aa, Triticum aestivum; identical to SEQ ID NO: 1244

SEQ ID NO: 1247 - protein, 279 aa, Triticum aestivum; identical to SEQ ID NO: 1244

SEQ ID NO: 1248 - protein, 279 aa, Triticum aestivum; identical to SEQ ID NO: 1244

SEQ ID NO: 1249 - protein, 279 aa, Triticum aestivum; identical to SEQ ID NO: 1244

SEQ ID NO: 1250 - protein, 274 aa, Triticum aestivum
MKQRGFVPDVGTYNSIIDAMCKARAMDKAKLVLRQMVDSGVRPDIVTYNKLIHGYSISGQFEEVVTLLEKMRSQGVKPTVFTCNTVMDYLCKHGRIKEAAEFFYSMVEKGHKPNIVSYAIMLHGYAKEGSLVEMTDLCELMARDGIVSYLHCFNILINAYAKCGMMDVAILFFKDMLKQGVNPDEVTYLAVIAGYCRVGMMDDAMEKFNEMIGMGVPHNATVYRCMIQGYLNHGDFLKAKELITEMKTKGIHPRLSKSQGIDPGYLMSQLFPGA

SEQ ID NO: 1251 - protein, 274 aa, Triticum aestivum; identical to SEQ ID NO: 1250

SEQ ID NO: 1252 - protein, 274 aa, Triticum aestivum; identical to SEQ ID NO: 1250

SEQ ID NO: 1253 - protein, 274 aa, Triticum aestivum; identical to SEQ ID NO: 1250

SEQ ID NO: 1254 - protein, 274 aa, Triticum aestivum; identical to SEQ ID NO: 1250

SEQ ID NO: 1255 - protein, 274 aa, Triticum aestivum; identical to SEQ ID NO: 1250

SEQ ID NO: 1256 - protein, 283 aa, Triticum aestivum
MPCARSGQWTRQSWSFSRWLIMVFDQICIHAWNSFMYSLCKNGGSKEAAEFFDSMTSKGLKPNIVVYSTLLHGYATEGCLADMINLFNSMKDNAIVANCNVFNILIDAYAKRGMMHEAMLIFTEMQEQRVSPNVFTYAIVTAALCRMGRLSDAMDKLNEMIAMGLQPNKVVYHSLIQGFCTHGDLVKAKALVSEMMNKGIPRPNIVFFSSVINSLCKEGRVTEAHDIFDLAINIGERPNVITFSSLIDGYCLAGKMDKAFGVLDANTFEYFKENMCKRISRWK

SEQ ID NO: 1257 - protein, 283 aa, Triticum aestivum; identical to SEQ ID NO: 1256

SEQ ID NO: 1258 - protein, 283 aa, Triticum aestivum; identical to SEQ ID NO: 1256

SEQ ID NO: 1259 - protein, 283 aa, Triticum aestivum; identical to SEQ ID NO: 1256

SEQ ID NO: 1260 - protein, 283 aa, Triticum aestivum; identical to SEQ ID NO: 1256

SEQ ID NO: 1261 - protein, 283 aa, Triticum aestivum
MPCARSGQWTRQSWSFSRWLIMVFDQICIHAWNSFMYPLCKNGGSKEAAEFFDSMTSKGLKPNIVVYSTLLHGYATEGCLADMINLFNSMKDNAIVANCNVFNILIDAYAKRGMMHEAMLIFTEMQEQRVSPNVFTYAIVTAALCRMGRLSDAMDKLNEMIAMGLQPNKVVYHSLIQGFCTHGDLVKAKALVSEMMNKGIPRPNIVFFSSVINSLCKEGRVTEAHDIFDLAINIGERPNVITFSSLIDGYCLAGKMDKAFGILDANTFEYFKENMCKRISRWK

SEQ ID NO: 1262 - protein, 283 aa, Triticum aestivum; identical to SEQ ID NO: 1256

SEQ ID NO: 1263 - protein, 254 aa, Triticum aestivum
  SITE 4: note = misc_feature - Xaa can be any naturally occurring amino acid
  REGION 33..34: note = misc_feature - Xaa can be any naturally occurring amino acid
  REGION 38..39: note = misc_feature - Xaa can be any naturally occurring amino acid
  REGION 42..46: note = misc_feature - Xaa can be any naturally occurring amino acid
MVSXGLRPDSFSYDTLLNGYCKAGRIDNACCLXXEMLXXGVXXXXXTYNTILNGLFRSGRFSEARELYVNMIKSRKLWSICTYSIILDGFCKNNCFDEAFKIFQSLCSMDLQLDIITFNIMIDGLFKGGRKEDAMDLFATISAYGLVPDVVTYRLIAENLIEEGSLGEFDGLFSAMEKSGTAPNSHMLNALVRRLLHRGDISRAGVYLYKLDEKNFSLEASTTSMLISLYSRGEYQPHAKSLPEKYRFLIEANS

SEQ ID NO: 1264 - protein, 186 aa, Triticum aestivum
MPRIPLCNSTMPMSRIGLRRRRLSSSFSTSTSTARSSRSWSPHAAFAAATERVRAGTLSPEDAHHLFDQLLRQDTPVQERSLGGFLAALARAPDSASCRDGPSLALSLFNRVCREEAGRRVAPPTAYTYAILMNCCCRVRRPDLGLALFGRLLRTGLKTNEIVANTLLKCLLLRKTDRRGCQRAAS

SEQ ID NO: 1265 - protein, 186 aa, Triticum aestivum; identical to SEQ ID NO: 1264

SEQ ID NO: 1266 - protein, 223 aa, Triticum aestivum
MPRIPLCNSTMPMSRIGLRRRRLSSSFSTSTSTARSSRSWSPHAAFAAATERVRAGTLSPEDAHHLFDQLLRQDTPVQERSLGGFLAALARAPDSASCRDGPSLALSLFNRVCREEAGRRVAPPTAYTYAILMNCCCRVRRPDLGLALFGRLLRTGLKTNEIVANTLLKCLCCAKRTDEAVSVLLHRMSKLSLVVCLMPSHTTQFLRAYVIIAAASGRSTSFR

SEQ ID NO: 1267 - protein, 223 aa, Triticum aestivum; identical to SEQ ID NO: 1266

SEQ ID NO: 1268 - protein, 186 aa, Triticum aestivum; identical to SEQ ID NO: 1264

SEQ ID NO: 1269 - protein, 186 aa, Triticum aestivum; identical to SEQ ID NO: 1264

SEQ ID NO: 1270 - protein, 226 aa, Triticum aestivum; identical to SEQ ID NO: 1228

SEQ ID NO: 1271 - protein, 137 aa, Triticum aestivum
MPRRSWPAGGAAHNLHLRRPHELMRPHSSALGLVFFGRLLRRGLKTNTIVFSSLLKCLCHAKRTDEAVSVLLHRMSELGCVPDAFSYTIVLKSLCDGSSSQRALDLLQMMEKGEGVCSPLAWCYIPRSSTASLRKGK

SEQ ID NO: 1272 - protein, 137 aa, Triticum aestivum; identical to SEQ ID NO: 1271

SEQ ID NO: 1273 - protein, 255 aa, Triticum aestivum
MLDRGICPDTVFFNTIMDRLCKNERVMEAQDLFDLMVHMGVKPDVCTYNTLIGGYLFVGKMDEVSKLLDNMVSIGMEPDVITYNILIDGYSKNGKIDDALVVFRGILERKDKPSVITFNIMIGALLKCRRKEEAKDLFDGIWAKGLVPDVVTYSLMIQKLIEEGSLQESDDLFLSMEKNGYPANSCMLNAIVRRLLQKGEMPRAGTYLSKIDERNFTLEASTTSLLTALASVGKCQEYKGLLPEKYHCFLEQGTD

SEQ ID NO: 1274 - protein, 255 aa, Triticum aestivum; identical to SEQ ID NO: 1273

SEQ ID NO: 1275 - protein, 255 aa, Triticum aestivum; identical to SEQ ID NO: 1273

SEQ ID NO: 1276 - protein, 255 aa, Triticum aestivum; identical to SEQ ID NO: 1273

SEQ ID NO: 1277 - protein, 255 aa, Triticum aestivum; identical to SEQ ID NO: 1273

SEQ ID NO: 1278 - protein, 255 aa, Triticum aestivum; identical to SEQ ID NO: 1273

SEQ ID NO: 1279 - protein, 260 aa, Triticum aestivum
MNYFLRCWIAAFVPTVFFNTIMDRLCKNERVMEAQDLFDLMVHMGVKPDVCNYNTLIGGYLFDGKMDEVRKLLDNMVSIGLKPDVITYTILIDGYSKNGRIDDALVVSREMLAGNVKPCVITLNIMIGALLKGGRKEEAKDLFDGIWAKGLVPTVVTYSLMIQKLIEEGSLQESDDLFLSMEKNGCAADSHMLNAIVRSLLRKGEVPRAGTYLSKIDERRFTLEASTASLLAAVASGGKGQEYKELLPEKYHYFLEQGTD

SEQ ID NO: 1280 - protein, 260 aa, Triticum aestivum; identical to SEQ ID NO: 1279

SEQ ID NO: 1281 - protein, 260 aa, Triticum aestivum; identical to SEQ ID NO: 1279

SEQ ID NO: 1282 - protein, 260 aa, Triticum aestivum; identical to SEQ ID NO: 1279

SEQ ID NO: 1283 - protein, 260 aa, Triticum aestivum; identical to SEQ ID NO: 1279

SEQ ID NO: 1284 - protein, 260 aa, Triticum aestivum; identical to SEQ ID NO: 1279

SEQ ID NO: 1285 - protein, 227 aa, Triticum aestivum
MSDLGCVPNCISHGIVLKSLCEDSRSQQALDLLRMMAKEGGACSPSLVTYNTVIHGFFKEGQVSKACNLYHEMMQQGVVPDVVTYNSIIDALCKARAMGKAELFLRQMVDNGVRPDNVTYTAVIHGYSTLGQWKKAAKMFREMTSLGLVPNTVTWNSSMASLCKHGRSKEAAEIFHSMAAKGHKPDVVSYRVLLQGYATEGALQIWLISIIQCQAMVLYPIARFSTY

SEQ ID NO: 1286 - protein, 227 aa, Triticum aestivum; identical to SEQ ID NO: 1285

SEQ ID NO: 1287 - protein, 272 aa, Triticum aestivum
MSCVYLKNFPAAHVQHRHQNGRTTDPRSICHFPDQARPPHPRRLTRRRRRRRRRSSSSTSTYPQPPGVQLPPPPPQLLLSHPAHVTMFRMRLRNSSTMPMSRIGLLLRRLSSSSSSSYFSTSTSPPSRSRSWSPRDAFAAATERVRAGTLSPEDAHHLFDQLLRQDTPVHERSLGGFLAALARAPDSAACRDGPALAIALFNRVCREEAGRPVVPPTVYTYAILMNCCCRVRRPDLGLALFGRLLRTGLKQMRSSPAPSSSASAAQNGQMKQ

SEQ ID NO: 1288 - protein, 272 aa, Triticum aestivum
MSCVYLKNFPAAHVQHRHQNGRTTDPRSICHFPDQARPPHPRRLTRRRRRRHRRSSSSTSTYPQPPGVQLPPPPPQLLLSHPAHVTMFRMRLRNSSTMPMSRIGLLLRRLSSSSSSSYFSTSTSPPSRSRSWSPRDAFAAATERVRAGTLSPEDAHHLFNQLLRQDTPVHERSLGGFLAALARAPDSAACRDGPALAIALFNRVCREEAGRPVVPPTVYTYAILMNCCCRVRRPDLGLALFGRLLRTGLKQMRSSPAPSSSASAAQNGQMKQ

SEQ ID NO: 1289 - protein, 272 aa, Triticum aestivum; identical to SEQ ID NO: 1288

SEQ ID NO: 1290 - protein, 272 aa, Triticum aestivum
MSCVYLKNFPAAHVQHRHQNGRTTDPRSICHFPDQARPPHPRRLTRRRRRRHRRSSSSTSTYPQPPGVQLPPPPPQLLLSHPAHVTMFRMRLRNSSTMPMSRIGLLLRRLSSSSSSSYFSTSTSPPSRSRSWSPRDAFAAATERVRAGTLSPEDAHHLFDQLLRQDTPVHERSLGGFLAALARAPDSAACRDGPALAIALFNRVCREEAGRPVVPPTVYTYAILMNCCCRVRRPDLGLALFGRLLRTGLKQMRSSPAPSSSASAAQNGQMKQ

SEQ ID NO: 1291 - protein, 272 aa, Triticum aestivum; identical to SEQ ID NO: 1287

SEQ ID NO: 1292 - protein, 272 aa, Triticum aestivum; identical to SEQ ID NO: 1288

SEQ ID NO: 1293 - protein, 188 aa, Triticum aestivum
MLHEMVECGTTVSLSTYNIILGGLCRNDCTDEAIVLFQKLGAMNVKLDITTLNTMIDAMYKVRRRQEAKDLFAAISASGLVPNSPTYGTMIQSLQKEGLMEEADNIFSSMEKSGCVLSSRLLNDIIRTLLEKGEILKAGNYMSKIDGKNAQLEASTSSLLLSLFSGEGESREQIQLLPVKYQFFDAVS

SEQ ID NO: 1294 - protein, 188 aa, Triticum aestivum
MLHEMVECGTTVSLSTYNIILGGLCRNDCTDEAIVLFQKLGAMNMKLDITTLNTMIDAMYKVRRRQEAKDLFAAISASGLVPNSPTYGTMIQSLLKEGLMEEADNIFSSMEKSGCVLSSRLLNDIIRTLLEKGEILKAGNYMSKIDGKNAQLEASTSSLLLSLFSGEGKYREQIQLLPVKYQFFDAVS

SEQ ID NO: 1295 - protein, 188 aa, Triticum aestivum; identical to SEQ ID NO: 1293

SEQ ID NO: 1296 - protein, 188 aa, Triticum aestivum; identical to SEQ ID NO: 1293

SEQ ID NO: 1297 - protein, 188 aa, Triticum aestivum; identical to SEQ ID NO: 1293

SEQ ID NO: 1298 - protein, 188 aa, Triticum aestivum; identical to SEQ ID NO: 1293

SEQ ID NO: 1299 - protein, 188 aa, Triticum aestivum; identical to SEQ ID NO: 1293

SEQ ID NO: 1300 - protein, 222 aa, Triticum aestivum
MSELGCVPDAFSYTIVLKILCDASSSQWALDLLQTMEKGGGVCSPDVVSYTTVIHNLLKEGEVSKACNLYHEMVQQGVVPDVRTYSSIINALCKAEAMDKAELFLRQMVDKGVRPNNKTYTSIIHGYSTLGRWKEAGKMFREMTSQGIIPDVVTWTSFMASFCKHGRSREAAKIFDYMSSRGHKPNVVSYSILFHGYGIEGCFADMINLLNSMANNGIVPNR

SEQ ID NO: 1301 - protein, 222 aa, Triticum aestivum
MSELGCVPDAFSYTIVLKILCDASSSQWALDLLQTMEKGGGVCSPDVVSYTTVIHNLLKEGEVSKACNLYHEMVQQGVVPDVRTYSSIINALCKAEAMDKAELFLRQMVDKGVRPNNKTYTSIIHGYSTLGRWKEAGKMFREMTSQGIIPDVVTWTSFMASFCKHGRSREAAKNFDYMSSRGHKPNVVSYSILFHGYGIEGCFADMINLLNSMANNGIVPNR

SEQ ID NO: 1302 - protein, 222 aa, Triticum aestivum; identical to SEQ ID NO: 1300

SEQ ID NO: 1303 - protein, 222 aa, Triticum aestivum
MSELGCVPDAFSYTIVLKIICDACSSQWALDLVQTMEKGGGVCSPDVVSYTTVIHDLLKEGEVSKACNLYHEMVQQGVVPDVRTYSSIINALCKAEAMDKAELFLCQMVDNGVRPNNKTYTSIIHGYSTLGRWKEAGKMFREMTSQGIIPDVVTWTSFMASFCKHGRSREAAKIFDYMSSRGHKPNVVSYSILFHGYGTEGCFADMINLLNSMANNGIVPNR

SEQ ID NO: 1304 - protein, 222 aa, Triticum aestivum; identical to SEQ ID NO: 1303

SEQ ID NO: 1305 - protein, 222 aa, Triticum aestivum; identical to SEQ ID NO: 1300

SEQ ID NO: 1306 - protein, 172 aa, Triticum aestivum
MDCCCRARRPELGLALFVRVLRKGLKTNQIVANTFLKCLCYAKRTDEAVNVLLHRMSELGCVPDAFSYNIVLKIFCDNSMSQRGLELLQMMAKEGGGCFPDMVAYNTVIHGLFKEGEIGKACNLFHEMVQQGVVPGVVTYSSIIDALCKARAMDKAELVLRQMVANGAQPNQ

SEQ ID NO: 1307 - protein, 172 aa, Triticum aestivum; identical to SEQ ID NO: 1306

SEQ ID NO: 1308 - protein, 172 aa, Triticum aestivum; identical to SEQ ID NO: 1306

SEQ ID NO: 1309 - protein, 172 aa, Triticum aestivum; identical to SEQ ID NO: 1306

SEQ ID NO: 1310 - protein, 189 aa, Triticum aestivum
MRSQGVMPNVVTCNSVMTYHCKNGRVKEAAEIFYSMAVNGRKPDVISYSIMLHGHATEGSIVEMIDLCELMARDGVVPNRSVFNILIKAYAKYGMMDVAMLFFEDMLKKGVNPNEVTYLTVISAFCKMGRMDDAMEKFNEMIDMGVPLDTEVYMCMVEGYFNHDDSMKAEEFITKMKSRDIFHRPRKGN

SEQ ID NO: 1311 - protein, 189 aa, Triticum aestivum; identical to SEQ ID NO: 1310

SEQ ID NO: 1312 - protein, 189 aa, Triticum aestivum; identical to SEQ ID NO: 1310

SEQ ID NO: 1313 - protein, 189 aa, Triticum aestivum; identical to SEQ ID NO: 1310

SEQ ID NO: 1314 - protein, 189 aa, Triticum aestivum; identical to SEQ ID NO: 1310

SEQ ID NO: 1315 - protein, 189 aa, Triticum aestivum; identical to SEQ ID NO: 1310

SEQ ID NO: 1316 - protein, 253 aa, Triticum aestivum
MSRRVVPVGRRILEQNIKARYHARDIGTEDALHLFDELLPYAGRSSIHAINCLLTVVGRDCPALGASLFNRVARSKVAPSSITYAILVDCCCRAGRQDLGHTAMGQVIKMGFLADAMITFSHLLKAICAENKTSYAMDILLRIMPMFNCVPDVISYNILFKGDCNEKRSQEALELIQVMVEHGGGCQPTVVSYSTVIDGLLKEGEVNKAYSLFCQMLQRGISPDVVTCSSIISGMCKLHAMDKAEEVLQQMLD

SEQ ID NO: 1317 - protein, 253 aa, Triticum aestivum; identical to SEQ ID NO: 1316

SEQ ID NO: 1318 - protein, 253 aa, Triticum aestivum; identical to SEQ ID NO: 1316

SEQ ID NO: 1319 - protein, 209 aa, Triticum aestivum
MDCCCRVRRPKLVLTLFSLFLMKGLKTNQIIVNTFLKCLCYAKRTDEAVNVLLHRMAELVCVPNAFSYNIVLKSFCDYSMSQRALELLQMIAKEGGGCFPDVVAYNTVIHGLFMEGETGKACNLFHEMVQQDVAPSVVTYISIIDALCKARAMEKAELVLWQMVANGAHPDTMTYSCMINGYSTSGRLKEATKLLREMTGRGLIPDIVT

SEQ ID NO: 1320 - protein, 259 aa, Triticum aestivum
MDCCCRVRRPKLVITLFSLFLMKGLKTNQIIVNTFLKCLCYAKRTDKAVNVLLHRMSELGCVPNAFSYNIVLKSSCDYSMSQRALELLQMIAEEGGGCFPDVVAYNTVIHGLFMEGETGKACNLFHEMVQQDVAPSVVTYISIIDALCKARAMEKTELVLWQMVANGAHPDTMTYSCMINGYSTSGRLKEATKLLREMTGRGLIPDIVTCNSFLASLCKLGRSKEAAEFFESMTAKGHKTGYRLIPHFASWVCYRRMLC

SEQ ID NO: 1321 - protein, 254 aa, Triticum aestivum
MDCCCRVRRPKLVLTLFSLFLMKGLKTNQIIVNTFLKCLCYAKRTDKAVNVLLHRMSELGCVPNAFSYNIVLKSFCDYSMSQRALELLQMIAKEGGGCFPDVVAYNTVIHGLFMEGETGKACNLFHEMVQQDVAPSVVTYISIIDALCKARAMEKAELVLWQMVANGAHPDTMTYSCKINGYSTFGRLKEATKLLREMTGRGLIPDIVTCNSFLASLCKLGRSKEAAEFFESMTAKGHKTGYRLIPHFASWVCY

SEQ ID NO: 1322 - protein, 254 aa, Triticum aestivum
MDCCCRVRRPKLVLTLFSLFLMKGLKTNQIIVNTFLKCLCYAKRTDKAVNVLLHRMSELGCVPNAFSYNIVLKSFCDYSMSQRALELLQMIAKEGGGCFPDVVAYNTVIHGLFMEGETGKACNLFHEMVQQDVAPSVVTYISIIDALCKARAMEKAELVLWQMVANGAHPDTMTYSCMINGYSTSGRLKEATKLLREMTGRGLIPDIVTCNSFLASLCKLGRSKEAAEFFESMTAKGHKTGYRLIPHFASWVCY

SEQ ID NO: 1323 - protein, 259 aa, Triticum aestivum; identical to SEQ ID NO: 1320

SEQ ID NO: 1324 - protein, 254 aa, Triticum aestivum; identical to SEQ ID NO: 1322

SEQ ID NO: 1325 - protein, 179 aa, Triticum aestivum
MDCCCRARRPDLGLAFFGRLLRTGLRTDGIDAYALIRCFCLAKRTDKAVSVLLHRMPELGCAPDALSYSVVLKVLCDDGRSQRALDLPQMMSKEGGGCAPNVVAYSTVIHGFCKEGEVSKACDLFNEMEHQGVKPNVVTYTSIIDALCKARAMDKAESFLRQMVDNDVRPNNVAYKCMI

SEQ ID NO: 1326 - protein, 179 aa, Triticum aestivum; identical to SEQ ID NO: 1325

SEQ ID NO: 1327 - protein, 179 aa, Triticum aestivum; identical to SEQ ID NO: 1325

SEQ ID NO: 1328 - protein, 179 aa, Triticum aestivum; identical to SEQ ID NO: 1325

SEQ ID NO: 1329 - protein, 179 aa, Triticum aestivum; identical to SEQ ID NO: 1325

SEQ ID NO: 1330 - protein, 179 aa, Triticum aestivum; identical to SEQ ID NO: 1325

SEQ ID NO: 1331 - protein, 179 aa, Triticum aestivum; identical to SEQ ID NO: 1325

SEQ ID NO: 1332 - protein, 243 aa, Triticum aestivum
MSSLRVLRRSSTSTSTSTSPPSRSWSPTAAFAAATERVRAGTLSQDDAHHLFDELLRQVTPVPERPLNGFLAALARATSSAACIRDGPALDVALFNRVCREQAGPRVAPLTVHTYNILMDCCCRASRPDLGLAFFARLLRTGLKTDEITANTFLKCLCYAKRTDEAVNVLLHRMSELGCVPNAFSYSIVLKSLCDNSMSQRALDLLQMMAKEGGACSPNVVAYSTVIHGFLGRRNRQGMQSVP

SEQ ID NO: 1333 - protein, 243 aa, Triticum aestivum; identical to SEQ ID NO: 1332

SEQ ID NO: 1334 - protein, 243 aa, Triticum aestivum; identical to SEQ ID NO: 1332

SEQ ID NO: 1335 - protein, 243 aa, Triticum aestivum
MSSLRVLRRSSASTSTSTSPPSRSWSPTAAFAAATERVRAGTLSQDDAHHLFDELLRQVTPVPERPLNGFLAALARATSSAACIRDGPALDVALFNRVCREQAGPRVAPLTVHTYNILMDCCCRASRPDLGLAFFARLLRTGLKTDEITANTFLKCLCYAKRTDEAVNVLLHRMSELGCVPNAFSYSIVLKSLCDNSMSQRALDLLQMMAKEGGACSPNVVAYSTVIHGFLGRRNRQGMQSVP

SEQ ID NO: 1336 - protein, 243 aa, Triticum aestivum; identical to SEQ ID NO: 1335

SEQ ID NO: 1337 - protein, 243 aa, Triticum aestivum; identical to SEQ ID NO: 1332

SEQ ID NO: 1338 - protein, 133 aa, Triticum aestivum
MDCCCRARRPDLGLALFGRFLRTGLRTNEIVATTFLKCLCCAKQIDEAVKVLLHRMPKLGCVPNAISYSIVLKSLCENSMSQQALDLLQMVGKEGGCLRDVMAYNTIIHGFFKEGGIDKARGYADCGDIQHSN

SEQ ID NO: 1339 - protein, 228 aa, Triticum aestivum
MPRLCSTTPMARLRRRRRYSSSTSSPSRRWDPRAAFAAATERIRAGTLRPEDAHHLFDELLLQANPVPERSLSDFLAALARAPSSAALRDGPSLALGLFNLVCREEAGPQVAPPTTCTYNILMDSCCRARRPDLGLAFFGRFLSTGLKANQIVATTLLKCLCHARRTDEAINVLLHRMSEFGCVPNVISYSIVLKSLCDDSRSQQALDLLQMVRKGGAAPSVWWHIAQ

SEQ ID NO: 1340 - protein, 228 aa, Triticum aestivum; identical to SEQ ID NO: 1339

SEQ ID NO: 1341 - protein, 228 aa, Triticum aestivum; identical to SEQ ID NO: 1339

SEQ ID NO: 1342 - protein, 228 aa, Triticum aestivum; identical to SEQ ID NO: 1339

SEQ ID NO: 1343 - protein, 228 aa, Triticum aestivum; identical to SEQ ID NO: 1339

SEQ ID NO: 1344 - protein, 228 aa, Triticum aestivum; identical to SEQ ID NO: 1339

SEQ ID NO: 1345 - protein, 246 aa, Triticum aestivum
  SITE 92: note = misc_feature - Xaa can be any naturally occurring amino acid
  SITE 95: note = misc_feature - Xaa can be any naturally occurring amino acid
  SITE 97: note = misc_feature - Xaa can be any naturally occurring amino acid
  SITE 102: note = misc_feature - Xaa can be any naturally occurring amino acid
  SITE 114: note = misc_feature - Xaa can be any naturally occurring amino acid
  SITE 119: note = misc_feature - Xaa can be any naturally occurring amino acid
  SITE 161: note = misc_feature - Xaa can be any naturally occurring amino acid
MIDKGVKPDNLTYTIIIDGLCKAQSVDRAEGVFQQMIDKGVKPNNGTYNCLIHGYLSTGQWEEVVQRIKEMSAHDLEPDVFTYGLLLDYLCXNGXCXEARSXFDSMIRKGIKPXVTIYXIMLHGYGTKGALSEMHDLLNLMVANGISPNHRIFNTMIYAYXKEAMIDEAMHIFIKMKQQGLSPDAVSYAELIDALCKLGRVDDAVLQFKQMINEGVTPDNVVFNSLVYGLCTVDKWEKVENYFSKC

SEQ ID NO: 1346 - protein, 253 aa, Triticum aestivum
MSRRFVPVDRRILERNIKARYHAGDIGTEDALNLFDELIQVAGPSSVLAINCLLTVVGRDCPALGVSLFNRVARAKVPPHNITYGILVDCCCRAGRLDLGHAGMGHVIKLGFAAEAIVNFSHLLKAICAEEKTSYAMEIVLRIMPEFNCIPNIFSYSILLKGLCNEKRSQEALELIHMMIDHGGSCQPNVVSYSTVLDGLLKDGEVGKAYSLFCVMLQRGISPNVVTCNSIISGMCKVHAMDKAEEVLQQMTD

SEQ ID NO: 1347 - protein, 253 aa, Triticum aestivum; identical to SEQ ID NO: 1346

SEQ ID NO: 1348 - protein, 253 aa, Triticum aestivum; identical to SEQ ID NO: 1346

SEQ ID NO: 1349 - protein, 205 aa, Triticum aestivum
MSRRFVPVDRRILERNIKARYHAGDIGTEDALNLFDELIQVAGPSSVLAINCLLTVVGRDCPALGVSLFNRVARAKVPPHNITYGILVDCCCRAGRLDLGHAGMGHVIKLGFAAEAIVNFSHLLKAICAEKKTSYAMDIVLRIMPEFNCIPNIFSYSILLKGLCNEKRSQEALELIHMMIDHGGSCQPNVVSYSTVLDGLLKEGE

SEQ ID NO: 1350 - protein, 205 aa, Triticum aestivum
MSRRFVPVDRRILERNIKARYHAGDIGTEDALNLFDELIQVAGPSSVLAINCLLTVVGRDCPALGVSLFNRVARAKVPPHNITYGILVDCCCCAGRLDLGHAGMGHVIKLGFAAEAIVNFSHLLKAICAEKKTSYAMDIVLRIMPEFNCIPNIFSYSILLKGLCNEKRSQEALELIHMMIDHGGSCQPNVVSYSTVLDGLLKEGE

SEQ ID NO: 1351 - protein, 241 aa, Triticum aestivum
MSSLRLLRRSSTSTSTSPPSRSWSPTAAFAAATERVRAGTLSQDDAHHLFDELLRQATPVPERPLNGFLAALARATSSAACITDGPALAVALFNRVCREQSGPRVVPLTVCTYNILMDCCCRTSRTDLGLAFFARLLRTGLKTDEITANTFLKCLCYAKRTDEAVNVLLHRMSELGCVPNAFSYSIVLKSLCNNNMSQRALDLLQMMAKDRGSCFPDVVAYSSHPWLFQGRRNKQGMQSVP

SEQ ID NO: 1352 - protein, 264 aa, Triticum aestivum
MSRLQVRSFSSSVSSRANELLNELHDHLGFGTLRPELAHQLFDEMLHQPVTVSVRALDDLFAALARVPASPACTDGPALAIDLFNRMARAGRRQVLAPSIYTYNILIECCHRACRPDLGPAFFGRLLKTGIKTDVVTYSSLLKCLCDMKRTEEALGVLLHRMPDDLPNVISYSVILKSFCDSGRSQLALDLLRMMAEKGSDHSPSMVLYSLVIDGFLKEGEISKACNLLPEMMQQGVVPDVVTYNSFIDALCKARAMDKAEVVL

SEQ ID NO: 1353 - protein, 264 aa, Triticum aestivum
MSRLQVRSFSSSVSSRANELLNELHGHLGFGTLRPELAHQLFDEMLHQPITVSVRALDDLFAALARAPASPACTDGPALAIDLFNRMARAGRRQVLAPSIYTYNILIECCHRACRPDLGPAFFGRLLKTGIKTDVVTYISLLKCLCDMKRTEEALGVLLHRMPDDLPNVISYSVILKSFCDSGRSQLALDLLRMMAEKGSDHSPSVVLYSLVIDGFLKEGEISKACNLLPEMMQQGVVPDVVTYNSFIDTLCKAREMDKAEVVL

SEQ ID NO: 1354 - protein, 264 aa, Triticum aestivum
MSRLQVRSFSSSVSSRANELLNKLHDHLGFGTLRPELAHQLFDEMLHQPVTVSVRALDDLFAALARVPASPACTDGPALAIDLFNRMARAGRRQVLAPSIYTYNILIECCHRACRPDLGPAFFGRLLKTGIKTDVVTYSSLLKCLCDMKRTEEALGVLLHRMPDDLPNVISYSVILKSFCDSGRSQLALDLLRMMAEKGSDHSPSMVLYSLVIDGFLKEGEISKACNLLPEMMQQGVVPDVVTYNSFIDALCKARAMDKAEVVL

SEQ ID NO: 1355 - protein, 264 aa, Triticum aestivum
MSRLQVCSFSSSVSSRANELLNELHDHLGFGTLRPELAHQLFDEMLHQPVTVSVCALDDLFAALARVPASPACTDGHALAIDLFNRMARAGRRQVLAPSIYTYNILIECCHRACRPDLGPAFFGRLLKTGIKTDVVTYSSLLKCLCDMKRTEEALGVLLHRMPDDLPNVISYSVILKSFCDSGRSQLALDLLRMMAEKGSDHSPSVVLYSLVIDGFLKEGEISKACNLLPEMMQQGVVPDVVTYNSFIDALCKARAMDKAEVVL

SEQ ID NO: 1356 - protein, 264 aa, Triticum aestivum; identical to SEQ ID NO: 1354

SEQ ID NO: 1357 - protein, 264 aa, Triticum aestivum; identical to SEQ ID NO: 1352

SEQ ID NO: 1358 - protein, 264 aa, Triticum aestivum; identical to SEQ ID NO: 1354

SEQ ID NO: 1359 - protein, 177 aa, Triticum aestivum
MAQQGVKPNVVTYNSVIDALCKAKAMDKAEVVLRQMIDHSVGPNSVTYSSLIHGYSSSGHWKEAVRVFKEMTSRRVTADVHTYNMFMTFLCKNGKSKDAAEIFNSMATKGLKPTTVSYAILLHGYATEGCLVDMTNFFNSMERDCILPDCCIFSILINAYAKSGKLDKAMLLHTAIW

SEQ ID NO: 1360 - protein, 215 aa, Triticum aestivum
MSHVRLHLHRRLLSSTSPPSRSWSPRDAFAVTTERLRAGTLCRDDAHNLFDELFRQAIPVPDRSLNGFLAALARATSSGACIRDGPALFNRVCREQAGSQVAPLTVHTYNILMDCCCRACRPDLGLALFGCILRTGLKIEQITANTLLKCLCYAKRTEEAVYVLLHRMSELGCVPDAFSCSIVLKSLCDNSMSQRGLDLLQMMAKGGGCSLNVGI

SEQ ID NO: 1361 - protein, 215 aa, Triticum aestivum
MSHVRLHLHRRLLSSTSPPSRSWSPRDAFAATTERLRAGTLCRDDAHNLFDELFRQAIPVPDRSLNGFLAALARATSSGACIRDGPALFNRVCREQAGSQVAPLTVHTYNILMDCCCRARRPDLGLALFGCILRTGLKIEQITANTLLKCLCYAKRTEEAVYVLLHRMSELGCVPDAFSCSIVLKSLCDNSMSQRGLDLLQMMAKGGGCSLNVGI

SEQ ID NO: 1362 - protein, 215 aa, Triticum aestivum; identical to SEQ ID NO: 1361

SEQ ID NO: 1363 - protein, 215 aa, Triticum aestivum; identical to SEQ ID NO: 1361

SEQ ID NO: 1364 - protein, 215 aa, Triticum aestivum; identical to SEQ ID NO: 1361

SEQ ID NO: 1365 - protein, 215 aa, Triticum aestivum
MSHVRLHLHRRLLSSTSPPSRSWSPRDAFAATTERLRAGTLCRDDAHNLFDELFRQAIPVPDRSLNGFLAALARATSSGACIRDGPALFNRVCREQAGSQVAPLTVHTYNILMDCCCRARRPDLGLALFGCILRTGLKIEQITANTLLKCLCYAKRTEEAVYVLLHRMSELGCVPDAFSCSIVLKSLCDNGMSQRGLDLLQMMAKGGGCSLNVGI

SEQ ID NO: 1366 - protein, 249 aa, Triticum aestivum
MPRVRPGSSSSTVSSRANQLLNKLKDHLDSGTLQPERAHQLFDKLLRQTVPVSASALNGLFAALARALPSAACTDGPALAIALFNRMAREGRRVIAPNIYTYSILIDCCCRSRRPDLGPAFFGFLLKTGIKADIITFTSLFKCLCHMKRIDEAVGVLLHRMPGDMPDAISYSIILKSFCNEGRSQRALDLLRMMAKKGANHSPEACTIVICGLIKEGELSKACSLFHEMMQQGVVPSVVAYSSIIDGLC

SEQ ID NO: 1367 - protein, 224 aa, Triticum aestivum
MEKALRVLDDMASAGIEPNVVTYGTLVDGYCRSGRIDDGLMLFREMLHKRVEPTTVTYNIILNGLFHAGRTVAAKMFHEMIKSGITVSISTYMIIHGGLCRNSHADEAITLFQKLGAMDVKLDVTILNTMINAMFKVQRREEANDLFAAISASGLVPNASTYGKNIQNLLEEGSLEEADDMFSSMEKSGCAPSSCLLNFIIRTLLKKGEIVKAGNYLYSYKKHT

SEQ ID NO: 1368 - protein, 224 aa, Triticum aestivum; identical to SEQ ID NO: 1367

SEQ ID NO: 1369 - protein, 224 aa, Triticum aestivum; identical to SEQ ID NO: 1367

SEQ ID NO: 1370 - protein, 224 aa, Triticum aestivum; identical to SEQ ID NO: 1367

SEQ ID NO: 1371 - protein, 249 aa, Triticum aestivum
MSRRYTITLISRLRVPRRCSSSTSISPPSRSWSPRDAFAAATERVRAGTLSPEDAHNLFDELLRQGTPVPERSLNGFLAALARATSSTACIKDGPALALALFNRVCREEASPQVAVPTVCTYSVLMDCCCRARRPDLGLALFGCILRKGLKIDQITANTLLKCLCYAKQTEEAVYVLLHRMSELSCVPDAFAYNIVLKSLCKGSRSQRAHDLLRTMAKDRGGCFPDVVTYTTVIHGFFKEGETGMQSIP

SEQ ID NO: 1372 - protein, 222 aa, Triticum aestivum
MLCKGLKPTTFNYNVILDGLFLAGQTVAAKEKFHEMVESGVTVCIDTYSIVLGGLCRNSCSSEAITLFQKLSAMNVKFDITIVNIIIGAFYRVERNQEAKDLFAAIPANGLVPNVVTYTIMMTNLIKEGSVEEADNLFLSMEKSGCTANSCLLNHIIRRLLEKGEIVKAGNYMSKVDAKSYSLEAKTVSQLISLFSRKGKYREHIKLLPTKYQFLEEAATVE

SEQ ID NO: 1373 - protein, 178 aa, Triticum aestivum
MPHLRLRRFSTAPMFHLLHCSSSSTSTSPPSRSWSPHAAFAAATERVRAGTLSPEDVHHLFDELLRQATPVPRRSLNGFLSTLARAPASAACIRASQQVAPLTVHTYGILMGCFCGARRPDLGLALFGRFLRTGLKTNEIIATTFLKCLCSAKRTDECRCQNRRISGRGSRTVRLGGW

SEQ ID NO: 1374 - protein, 198 aa, Triticum aestivum
  SITE 35: note = misc_feature - Xaa can be any naturally occurring amino acid
  SITE 37: note = misc_feature - Xaa can be any naturally occurring amino acid
MHSNEALDLLLHRMPELDCAPDVFSFNIVINGCFXEXEVDKACNLFHEMPQLGVQPDVVTYTSIMDALSKSGAMDKAEVLLRQMVDQGIEPNIRTYSCLIHGYSTFGQWKEALRVFKEMASLGVRPNSVTLNSFIDSLCKHRKTKKARDIFDSMAAKGHKPDIFSYSTMLNWYAKEGCFDDMTDLFNSMVRNGIVRNG

SEQ ID NO: 1375 - protein, 153 aa, Triticum aestivum
MRQRAAERTPLHGHLGFGTLRPDLAHQLFDEMLRQPVPVSVRALNGLFAALARAPPSTICTDAPALAIDLFNRMAQAGRRQVPAPTIITYNILIGCCHRACRPDLGPAFFGRLLKTGIKTNVITYNSLLKCLCDMKRTEEALGAAPQDARRPA

SEQ ID NO: 1376 - protein, 153 aa, Triticum aestivum; identical to SEQ ID NO: 1375

SEQ ID NO: 1377 - protein, 153 aa, Triticum aestivum; identical to SEQ ID NO: 1375

SEQ ID NO: 1378 - protein, 153 aa, Triticum aestivum; identical to SEQ ID NO: 1375

SEQ ID NO: 1379 - protein, 244 aa, Triticum aestivum
MPRRIPLPMPRRICIWLRCSSPSSSCTYPDSGLRHPSCLTSTLSGLRLRRSFTTPMSNLRLFRRSSSSTSTPTSRSSRSWSPHAAFAAATERVRAGTMNQDYAHNLFDELLRQATPVPGRSLNGFLAALARATSSAACIRNGPALTVALFNRVCREQAGLRVAPLTVHTYNILMDCCCRASRPDLGLALFGRFLRTGLKTNEIVASTLLKCLCYTKRTDEALNVLLHRMSELGCCLMPSHTTLF

SEQ ID NO: 1380 - protein, 244 aa, Triticum aestivum; identical to SEQ ID NO: 1379

SEQ ID NO: 1381 - protein, 244 aa, Triticum aestivum
MPRRIPLPMPRRICIWLRCSSPSSSCTYPDSGLRHPSCLTSTLSGLRLRRSFTTPMSNLRLFRRSSSSTSTPTSRSSRSWSPHAAFAAATERVRAGTMNQDYAHNLFDELLRQATPVPGRSLNGFLAALARATSSAACIRNGPALTVALFNRVCREQAGLRVAPLTVHTYNILMDCCCRASRPDLGLALFGRFLRTGLKTNEIVASTLLKCLCYAKRTDEALNVLLHRMSELGCCLMPSHTTLF

SEQ ID NO: 1382 - protein, 244 aa, Triticum aestivum; identical to SEQ ID NO: 1379

SEQ ID NO: 1383 - protein, 244 aa, Triticum aestivum; identical to SEQ ID NO: 1379

SEQ ID NO: 1384 - protein, 244 aa, Triticum aestivum; identical to SEQ ID NO: 1379

SEQ ID NO: 1385 - protein, 252 aa, Triticum aestivum
MRVTYSSIINALCKARAMDKAEVILRHMVHNGVQPHDRIYNTLIHGFLTLGQLKEAFRLLKVMRSQGSMPNGVTCTSVMDYLCKHGRIKEAEEIFYSMAVNGRKPDIVSYSIMLHGYAIEGSLVQMIDLCELMARDGVVPNLRCFNILINAYAKYGRMDVAMLFFEDMLKQGVKPNEFTYLTVISAFCKMGRMDDAMEKFSEMIDMGVPLETEVYMCMVEGYFNHGDSMKAEEFITKMKNRDIHHKPWKGNR

SEQ ID NO: 1386 - protein, 243 aa, Triticum aestivum
MMQQGVEPSVWTYSSIIDALCKARAMDKAELVLQQMVNKGVQPNNVTYNCMIHGYSTSGRWKEAAKLFREMKSRGLIPDTFTCNALMTYLCKHGRSKEAAEISDAMTAKGHKPDIVSYSILLHGYANEGCFADMIDLFNSMERNGIAADCHVFSILIGAYAKCELMDEAMLKFTQMRRQGVSPDAFTYSTVIVALCRVGRLADAIGKFGEMIAMGVQPDRPVYRSLIQGCFMHGGLVKATAGF

SEQ ID NO: 1387 - protein, 243 aa, Triticum aestivum; identical to SEQ ID NO: 1386

SEQ ID NO: 1388 - protein, 243 aa, Triticum aestivum; identical to SEQ ID NO: 1386

SEQ ID NO: 1389 - protein, 243 aa, Triticum aestivum; identical to SEQ ID NO: 1386

SEQ ID NO: 1390 - protein, 243 aa, Triticum aestivum; identical to SEQ ID NO: 1386

SEQ ID NO: 1391 - protein, 243 aa, Triticum aestivum; identical to SEQ ID NO: 1386

SEQ ID NO: 1392 - protein, 225 aa, Triticum aestivum
MVHNGVQPDVVTYNSLIQRFLTSGQLKEAIRLLKLMTSQGIMPDVVTCNSVMTYHCKNGRVKEAAEIFYSMAVKGRKPNVISYSIMLHGYAIQGPLVEMIDLCELMARDGVVPNLHCFNILINAYAKYGRMDVAMLFFEDMLKQGVKPNEFTYLTMMSAFCKMGRMDDVMEKLSEMIDMGVPVDTEVCMCMVEGYFNHGDSMKAKEFITRMKNMDIHHKPRKGNR

SEQ ID NO: 1393 - protein, 225 aa, Triticum aestivum; identical to SEQ ID NO: 1392

SEQ ID NO: 1394 - protein, 225 aa, Triticum aestivum; identical to SEQ ID NO: 1392

SEQ ID NO: 1395 - protein, 225 aa, Triticum aestivum; identical to SEQ ID NO: 1392

SEQ ID NO: 1396 - protein, 225 aa, Triticum aestivum; identical to SEQ ID NO: 1392

SEQ ID NO: 1397 - protein, 217 aa, Triticum aestivum
MEKALRVLDDMASAGIEPNVVTYGTLVDGYCRSGRIDDGLMLFREMLHKRVEPTTVTYNIILNGLFHAGRTVAAKMFHEMIKSGITVSISTYRIIHGGFCRNSHADEAITLFQKLGAMDVKLDVTILNTMINAMFKVQRREEANDLFAAISASGLVPNASTYGKNIQNLLEGGSLEEADDMFSSMEKSGCAPSSCLLNQNVIGKGGDSQGWKLSLLI

SEQ ID NO: 1398 - protein, 217 aa, Triticum aestivum; identical to SEQ ID NO: 1397

SEQ ID NO: 1399 - protein, 243 aa, Triticum aestivum
MSRRLVPVGSRLLERNIEHRYRSRNIGTEDALNLFGELIQDPGPTSVRAINGLLTVVGRDCPALGISLFNRVARAKVPPHNITYGILVDCCCRAGRLDLGHAAMGHVIKLGFAAEAIVNFSHLLKAICAEKKTSYAMDIVLRIMPMFNCIPNIFSYSILFKGLCNEKRSQEALELIHLMVEDGGSCQPNVVSYTTVVDGLLKEGEVGKAYSLFCEMLQRGISPDDVTYNSIISGMCKVHAMEG

SEQ ID NO: 1400 - protein, 246 aa, Triticum aestivum
MEKGGVCSPDVVSYTTVIHGLLKEGEVSKACSLFDEMVQQGVVPNVVTYSSIIDALCKAGAMDKTELVLWQMVDSGIQPDNVTYTSMIHGYSTLGRWKEAGKMFREMTSRGIIPDVVTWTSFMTSLCKHGRSREATGIIDYMSAKCHKPNIVLYSILFHGYATEGCFDDMINLLDSMANNAIVPNRQVFSILVDAYAKRGMMDEAMPIFTGMCEQGVIRDVYRWGQGVSPESTVGRLADALNKFVR

SEQ ID NO: 1401 - protein, 246 aa, Triticum aestivum; identical to SEQ ID NO: 1400

SEQ ID NO: 1402 - protein, 246 aa, Triticum aestivum; identical to SEQ ID NO: 1400

SEQ ID NO: 1403 - protein, 246 aa, Triticum aestivum; identical to SEQ ID NO: 1400

SEQ ID NO: 1404 - protein, 246 aa, Triticum aestivum
MEKGGVCSPDVVSYTTVIHGLLKEGEVSKACSLFDEMVQQGVVPNVVTYSSIIDALCKAGAMDKTELVLWQMVDSGIQPDNVTYTSMIHGYSTLGRWKEAGKMFREMTSRGIIPDVVTWTSFMTSLCKHGRSREATGIIDYMSAKCHKPNIVLYSILFHGYATEGCFDDMINLLDSMANNAIVPNRQVFSILVDAYAKRGMMDEAMPIFTGMCEQGVIPDVYRWGQGVSPESTVGRLADALNKFVR

SEQ ID NO: 1405 - protein, 246 aa, Triticum aestivum; identical to SEQ ID NO: 1404

SEQ ID NO: 1406 - protein, 225 aa, Triticum aestivum
MSRRLVPVGRRILEQSIKDRYYSAGIGTEDALQLFDELLPDAEPSLIRAINCLLTVIGRDCPALGVSHFNRVARANVAPNSITYTILVDCCCRAGRLDLGFAAMGHIIKMGFTAEAIFTFNHLLKAICAEKKTSYAMDIVLRIMPELNCTPNVFSYNILFKGLCNEKRSQEALELINIMVEDGGSCRPDVVTYNTVIGGLLKEGVVDKAYSLFCEMLKGRFCQML

SEQ ID NO: 1407 - protein, 225 aa, Triticum aestivum; identical to SEQ ID NO: 1406

SEQ ID NO: 1408 - protein, 225 aa, Triticum aestivum; identical to SEQ ID NO: 1406

SEQ ID NO: 1409 - protein, 225 aa, Triticum aestivum; identical to SEQ ID NO: 1406

SEQ ID NO: 1410 - protein, 225 aa, Triticum aestivum; identical to SEQ ID NO: 1406

SEQ ID NO: 1411 - protein, 225 aa, Triticum aestivum; identical to SEQ ID NO: 1406

SEQ ID NO: 1412 - protein, 222 aa, Triticum aestivum
MTNRSVTPDVCTYNLLMTSLYKNGNSKEAAQLFYSMATKGLKPDTVSYAILLHGYATEGCLVDMINLFNSMATDCILPNCHIFNILIYAYAKSGKLDKAMLIFKDMQKQGVSPDAVTYSTVIHAFCKKGRLDDAVIKFNQMIDTGVRPEASAYRSLIQGFCTHGDLVKAKEYVTEMMKKGMLPPDIMFFSSIMQKLCTEGREIIYRKLMQRATHLKLKLFRC

SEQ ID NO: 1413 - protein, 239 aa, Triticum aestivum
MVHSGVRPDTVTYTSLIHGYSTLGQFEEVVRLLEEMRSLGVKPNVFTCNTVMDYLWKHGRIKEAAEFFYSMAEKGHKPNIVSYAIMLHGYAKEGSLVEMSDLCELMARDGIVPDLRCFNILINAYAKCGMMDVAILFFKDMLKQGVNPDEITYLAVIAGYCRVGMMDDAMENFNEMIGMGVPHNATVYRCMIQGYLNHGDFLKAKELITEMKTKGIHPRPRKSQGIDPGYLMTQLFTGA

SEQ ID NO: 1414 - protein, 217 aa, Triticum aestivum
MSRIHLHRRLFSSTTRPLRSWSPRAAFAAVTERVRAGALSQDDAHHLFDELLRQATPVPGRSLDGFLAALVRAPASGACRDGPALALALFNRVCRDESGARVAPPTIFTYGILMNCCCRAHRPDLGLAFFARLLTTGLKADQIAANTFLKCLCYAKRTDEAVNVLLHRMSELGCVPNAFSYSIVLKSLCDNSMSQRALDLLQMMTRWRNDKSGSYTR

SEQ ID NO: 1415 - protein, 217 aa, Triticum aestivum
MSRIHLHRRLFSSTTRPLRSWSPRAAFAAVTERVRAGALSQDDAHHLFDELLRQATPVPGRSLNGFLAALVRAPASGACRDGPALALALFNRVCRDESGARVAPPTIFTYGILMNCCCRAHRPDLGLAFFARLLTTGLKADQIAANTFLKCLCYAKRTDEAVNVLLHRMSELGCVPNAFSYSIVLKSLCDNSMSQRALDLLQMMTRWRNDKSGSYTR

SEQ ID NO: 1416 - protein, 217 aa, Triticum aestivum; identical to SEQ ID NO: 1415

SEQ ID NO: 1417 - protein, 217 aa, Triticum aestivum; identical to SEQ ID NO: 1414

SEQ ID NO: 1418 - protein, 217 aa, Triticum aestivum; identical to SEQ ID NO: 1415

SEQ ID NO: 1419 - protein, 217 aa, Triticum aestivum; identical to SEQ ID NO: 1414

SEQ ID NO: 1420 - protein, 201 aa, Triticum aestivum
MTRLHSTMACACRVRIRCRRLSSSATSPSSRSWSPRAAFAASTERFRAGTLGRPDAHRLFDELLRRDTLVPSCSLNGLLPVLARATSSASCVTDGPALAVALFSRVLRAEAGPWVACPTVCTYGILMDCCYRVRRPDLGRASGRASRQTRSSPTTRSSASATPSGPTRPSACCFMGCPTSAVCLMPSHTTFRKRLSEDRRS

SEQ ID NO: 1421 - protein, 201 aa, Triticum aestivum; identical to SEQ ID NO: 1420

SEQ ID NO: 1422 - protein, 201 aa, Triticum aestivum; identical to SEQ ID NO: 1420

SEQ ID NO: 1423 - protein, 201 aa, Triticum aestivum; identical to SEQ ID NO: 1420

SEQ ID NO: 1424 - protein, 201 aa, Triticum aestivum; identical to SEQ ID NO: 1420

SEQ ID NO: 1425 - protein, 201 aa, Triticum aestivum; identical to SEQ ID NO: 1420

SEQ ID NO: 1426 - protein, 236 aa, Triticum aestivum
MDWPPSTGTTWKSTNRIDRLPLESSCSAFTTHTSKAMPRFSSTPPMSPPRLRVGLGAGHSSSTSHPSRIWDPHAAFAAATERARSGNLTPEDAHHLFDELLRQGNPVQERPLNNLLAALARAPASAACSDGPALAVNLFSRISQGARRRVAHPTACTYSILMDCCCRVHRLDLAFAFFARLLRTGLKANQVIFCTLLKGLCHAKRTDEALDVLLHRMPELGCTPNAVAYNPISVCI

SEQ ID NO: 1427 - protein, 236 aa, Triticum aestivum; identical to SEQ ID NO: 1426

SEQ ID NO: 1428 - protein, 243 aa, Triticum aestivum
MDYLCKSGRCGEARKLFDSMISLGQKPTVTTYNILLHGYAMERYFHDMHCLIDLMAENGISPDHYVYNILIFAYAKEKMVGEVMHIFTKMRQQGFNPDAASYGTGINLLCSIGRMDDAVLQFNQMVTEGLAPDIIVFTTLLSGFCSCGKWEKVHELFSEMLNRGIYPNAVFFNKIMSPLCKNGRVMAAQDLFDLMIHMGVKPDMHAYNTMMGGYMFVGKMDEVRKLLDNMVSTGLEPDIFTYG

SEQ ID NO: 1429 - protein, 243 aa, Triticum aestivum; identical to SEQ ID NO: 1428

SEQ ID NO: 1430 - protein, 239 aa, Triticum aestivum
MLLCMVYFLMITDGLSLFMEMSLSGVKPTTIMYNIILDGLFCSGRTVSAKEKFDTMIESGIPVGIDTYNIVLSGLCKNNCTDEAIELFKKLRAMNVKIDVITLNTMISAMFKTRRIEEAKDLFATISAIGLVPSVVTYILMITNFIKEGLLAEADDMFLAMEKAGCAPNSSLLNQVVRVLLEKGAAVQAATYLAKIDAKHLSLEASTVSLIISLFSRKGELWEHVKLLPVKYQPPEMFD

SEQ ID NO: 1431 - protein, 239 aa, Triticum aestivum; identical to SEQ ID NO: 1430

SEQ ID NO: 1432 - protein, 239 aa, Triticum aestivum; identical to SEQ ID NO: 1430

SEQ ID NO: 1433 - protein, 239 aa, Triticum aestivum; identical to SEQ ID NO: 1430

SEQ ID NO: 1434 - protein, 239 aa, Triticum aestivum; identical to SEQ ID NO: 1430

SEQ ID NO: 1435 - protein, 239 aa, Triticum aestivum; identical to SEQ ID NO: 1430

SEQ ID NO: 1436 - protein, 242 aa, Triticum aestivum
MMNRGIPHSNIPFFGSVIKNLCQEGRVMDAHEIFDLVIDMGERPDDILFNSLIVGYCLVGKMDKALKVLDVMESVGVEPDVITYNTLVNGYCKSGRIDDGFVLFREMPSKRVKPDTVTYGIILAGLFRAWRTVDARTMFHEMIESGITVDIVTYNIILTGLCRNNCIDEAIALFQKLGVMSVKFNIAILNTMIDAMYKVWRREEVSDLFAAISASTSRKTPISPGSLGPLVLVHEPGLMGRY

SEQ ID NO: 1437 - protein, 226 aa, Triticum aestivum
MGKAELFLRRMVDNSVQPDRVTYTSMIHGYSTLGRWKEATKMFREMTGRGLIPNIVTWNSFMASLCKHGRSKEAAEIFFSMAAKGNKPNIITYGILLHGYGNEGSFVDMMSLFNSMKGNGIVANRQVFNILIDAYAKRGLIDEAVLILTEMRGHGLSPDVLPKKGFPPLCIQSNQPNHTEIGVGAEAAQSRPKETTEKEQKKQMPTTADQQKRRSLAIAAPTGIFH

SEQ ID NO: 1438 - protein, 226 aa, Triticum aestivum; identical to SEQ ID NO: 1437

SEQ ID NO: 1439 - protein, 226 aa, Triticum aestivum; identical to SEQ ID NO: 1437

SEQ ID NO: 1440 - protein, 226 aa, Triticum aestivum; identical to SEQ ID NO: 1437

SEQ ID NO: 1441 - protein, 226 aa, Triticum aestivum; identical to SEQ ID NO: 1437

SEQ ID NO: 1442 - protein, 226 aa, Triticum aestivum
MGKAELFLRRMVDNSVQPDRVTYTSMIHGYSTLGRWKEATKMFREMTGRGLIPNIVTWNSFMAYLCKHGKSKEATEIFFSMAAKGNKPNIITYGILLHGYGNEESFVDMMSLFNSMKGNGIVANRQVFNILIDAYAKRGLIDEAVLILTEMRGHGLSPDVLPKKGFPPLCIQSNQPNHTEIGAGAEAAQSRPKETTEKEQKKQMPTTADQQKRRSLAIAAPTGIFH

SEQ ID NO: 1443 - protein, 185 aa, Triticum aestivum
MVESGTTVSISTYGIILGELCRNNCTEEAIILFHKLGAMNVKFDITIFNTMIDAMYKVRRREEANILFAAISANGLVPNASTYRIMITNLLKEGSMEEADHMFSSMETSGYAPSSVLLNAIIRMLLEKGEIVKAGNYLSKVDGKSISLEASTSLLMWHLFSTEGKYHEQIKSLPERYRFFGVRHS

SEQ ID NO: 1444 - protein, 185 aa, Triticum aestivum; identical to SEQ ID NO: 1443

SEQ ID NO: 1445 - protein, 185 aa, Triticum aestivum; identical to SEQ ID NO: 1443

SEQ ID NO: 1446 - protein, 185 aa, Triticum aestivum; identical to SEQ ID NO: 1443

SEQ ID NO: 1447 - protein, 185 aa, Triticum aestivum; identical to SEQ ID NO: 1443

SEQ ID NO: 1448 - protein, 185 aa, Triticum aestivum; identical to SEQ ID NO: 1443

SEQ ID NO: 1449 - protein, 185 aa, Triticum aestivum; identical to SEQ ID NO: 1443

SEQ ID NO: 1450 - protein, 221 aa, Triticum aestivum
MPRLRLRRFSTAPMFHLLRRSSSSTSTSPPSRSWSPHAAFAAATECVRAGTLSPEDAHHLFDELLRQATPVPERPLNGFLAALARAPASAACIRDGPALAVALFNRVCREEAGLQVAAPTVCTYNILMDCCCRAHRPDLGLAFFGRFLRTGLKTEQITVSTFLKCLCYAKRTEEAVNVLLHGMSELGCVPNAISYSIVLKSLCKNSMSQRALDLLFQCGGI

SEQ ID NO: 1451 - protein, 221 aa, Triticum aestivum; identical to SEQ ID NO: 1450

SEQ ID NO: 1452 - protein, 221 aa, Triticum aestivum; identical to SEQ ID NO: 1450

SEQ ID NO: 1453 - protein, 178 aa, Triticum aestivum
MDMALRIMPKFNCIPDVFSYNILFKGLCTEKRSQEALELIHVMAEDGGSCQPNVVSYSTVVDGLLKEGEVDKAYSLFCQMLKRRISPNVVTCSSIISVMCKVHAMDKAEQVLQQMFDTRILPNVATYTSLIQGYYSLGHCEEVDWIFKKMSRNGVQPNIVAYKHTDGLSLQERKMRIS

SEQ ID NO: 1454 - protein, 178 aa, Triticum aestivum; identical to SEQ ID NO: 1453

SEQ ID NO: 1455 - protein, 178 aa, Triticum aestivum; identical to SEQ ID NO: 1453

SEQ ID NO: 1456 - protein, 178 aa, Triticum aestivum; identical to SEQ ID NO: 1453

SEQ ID NO: 1457 - protein, 178 aa, Triticum aestivum; identical to SEQ ID NO: 1453

SEQ ID NO: 1458 - protein, 178 aa, Triticum aestivum; identical to SEQ ID NO: 1453

SEQ ID NO: 1459 - protein, 197 aa, Triticum aestivum
MTSTPMRRLLLCRRSSSSSTSTSPPSRPWSPHAAFAAATWTLTPKHAHHLFDELLRQDTPVPERSLDGFLAALTRASSSASCRDGPALALDLFSHLCREEAGPRVAPPTIFTYGVLMNCCCRTRRSQLGLAFFGRLLRTGLKTNTIVFSSLLKCLCHAKWADEAVSVLLHRMSELGCVPDAFSYTIVLKSLCDASSS

SEQ ID NO: 1460 - protein, 197 aa, Triticum aestivum; identical to SEQ ID NO: 1459

SEQ ID NO: 1461 - protein, 197 aa, Triticum aestivum; identical to SEQ ID NO: 1459

SEQ ID NO: 1462 - protein, 197 aa, Triticum aestivum
MTSTPMRRLLLCRRSSSSSTSTSPPSRPWSPHAAFAAATWTLTPKHAHHLFDELLRQDTPVPERSPDGFLADLTRASSSASCRDGPALALDLFSHLCREEAGPRVAPPTIFTYGVLMNCCCRTRRSQLGLAFFGRLLRTGLKTNTIVFSSLLKCLCHAKWTDEAVSVLLHRMSELGCVPDAFSYTIVLKSLCDASSS

SEQ ID NO: 1463 - protein, 197 aa, Triticum aestivum; identical to SEQ ID NO: 1459

SEQ ID NO: 1464 - protein, 197 aa, Triticum aestivum; identical to SEQ ID NO: 1462

SEQ ID NO: 1465 - protein, 221 aa, Triticum aestivum
MSLSGVKPTTIIYNIILDGLFCSGRTGSAKEKFHTMTESGIPVGVDTYNIVLSGLCRNNCTDEAIELFKKLRATNVKIDVMTLNIMISAMFKTRRIEEAKDLFATISAIGLVPSVVTYSVMMTNFIKEGSLAEADDMFLAMEKASCAPNSILLNQVVRALLEKGAVVKAATYLAKLDAKQLSVEASTISLIVSLFSGEGKLREHVELLPVKYQPPESSTDN

SEQ ID NO: 1466 - protein, 221 aa, Triticum aestivum; identical to SEQ ID NO: 1465

SEQ ID NO: 1467 - protein, 221 aa, Triticum aestivum; identical to SEQ ID NO: 1465

SEQ ID NO: 1468 - protein, 221 aa, Triticum aestivum; identical to SEQ ID NO: 1465

SEQ ID NO: 1469 - protein, 167 aa, Triticum aestivum
MYMFDFILGIGQRPDVIMYNSLMDGYCLVGKVEEAVRVLDAMKSAGLQPTTVTYGILLNGYCKIGRIAAGLSLFKEMSLSGVKPITIMYNIILDGLFCSGRTVCAKEKFHTMNESGIPVGVDTYNIVLSGLCKNNCTDEAIELFKELRAKNVKINVMILNTMIFCNV

SEQ ID NO: 1470 - protein, 167 aa, Triticum aestivum
MYMFDFILGIGQRPDVIMYNSLMDGYCLVGKVEEAVRVLDAMKSAGLQPTAVTYGILLNGYCKIGRIAAGLSLFKEMSLSGVKPTTIMYNIILDGLFCSGRTVCAKEKFHTMNESGIPVGVDTYNIVLSGLCKNNCTDEAIELFKELRAKNVKINVMILNTMIFCNV

SEQ ID NO: 1471 - protein, 167 aa, Triticum aestivum; identical to SEQ ID NO: 1470

SEQ ID NO: 1472 - protein, 167 aa, Triticum aestivum; identical to SEQ ID NO: 1470

SEQ ID NO: 1473 - protein, 167 aa, Triticum aestivum
MYMFDFILGIAQRPDVIMYNSLMDGYCLVGKVEEAVRVLDAMKSAGLQPTTVTYGILLNGYCKIGRIAAGLSLFKEMSLSGVKPITIMYNIILDGLFCSGRTVCAKEKFHTMNESGIPVGVDTYNIVLSGLCKNNCTDEAIELFKELRAKNVKINVMILNTMIFCNV

SEQ ID NO: 1474 - protein, 167 aa, Triticum aestivum; identical to SEQ ID NO: 1473

SEQ ID NO: 1475 - protein, 206 aa, Triticum aestivum
MTGRWDPHTLGCATPNSLRCVRTRRPFRTPPRRSLVSDSAIPFLLTSAPRRCPASAAPPPRRSPASTSSATSPPPPPPPPPRRQPHAPGHPMPPLPRPRSVSVPGHSGRKTHTTCSTNCFGRPSRSLNGFLAVLARVPASGVCIRDGPALAVSLFNRVCREEAGPQVARLTVCTYNILMDCCCRARRPELGLALFRRFLRKGLKTD

SEQ ID NO: 1476 - protein, 206 aa, Triticum aestivum; identical to SEQ ID NO: 1475

SEQ ID NO: 1477 - protein, 206 aa, Triticum aestivum; identical to SEQ ID NO: 1475

SEQ ID NO: 1478 - protein, 228 aa, Triticum aestivum
MVSIGEHACPPNSAFLLPNPNSCPGCAGAVGGERHRRPLGPLPLPDSSRSIGGAMSRRAVPAGRRILEQNIKSRYRAGAIGTDDALHLFDELLQVAWPSSIAAINCLLIVVGRDCPALAVSLFNHIARAKVAPHNITYGILVDCCSRAGRWTLASLPWATSLRRDLRQDPLSLSATCSGPSVRRRRPATEWTSCSELCLSLTAYRMFTPTTFFSRASATRREAKRLSS

SEQ ID NO: 1479 - protein, 228 aa, Triticum aestivum; identical to SEQ ID NO: 1478

SEQ ID NO: 1480 - protein, 228 aa, Triticum aestivum; identical to SEQ ID NO: 1478

SEQ ID NO: 1481 - protein, 220 aa, Triticum aestivum
MISTDIKPDTVVYHSLIQGFCTHGDLVKAKELVYEMINKDIPPPTIVLFSSIINSLCKEGRVTDAQDIFNLVIEIGESPDVFAFTSLLDGYCLVGKMEKASQVFDAMVSAGIEPNASTYSVMITNLLKQGLVEEAESMFSSMEKSGCAPDSPLMNDIIRILLEKGEIVKAGDYMSKVDGRSISLEATTTSLLKCLFSSKGKYREQINLLPVKYQFFNGAS

SEQ ID NO: 1482 - protein, 220 aa, Triticum aestivum; identical to SEQ ID NO: 1481

SEQ ID NO: 1483 - protein, 150 aa, Triticum aestivum
MGSGVLPVAHTGGGSGGGTSISLILSWLLCTLPHLYMYWPLTLGKAYLLTYPTIGTGVQPNTVVYHSLVQGLCTHGDLAKAEELVSEMMNKGIARPNKSLASSFLYHYSISGSIRRVGANPAYIRVSICQHISVCDNPAETIRCSCHPSF

SEQ ID NO: 1484 - protein, 150 aa, Triticum aestivum; identical to SEQ ID NO: 1483

SEQ ID NO: 1485 - protein, 150 aa, Triticum aestivum; identical to SEQ ID NO: 1483

SEQ ID NO: 1486 - protein, 224 aa, Triticum aestivum
MVHNGVQPDAVTYNSLIQGYSTLGQLKELVRLLKVMRSQGVLPDVVTYNSLMTCLCKNGRFKEAVEIFYSMAVKGQKPNVVSYSIMLHGYAIQGSLVEMIDLCELMARDGVVPDLHCFNILISAYAKYGRMDVAMLFFEDMLKKGLNPNEFIYLTVISAFCKMGRMDDALEKFNEMIDRGVPLDTKIYVCMIEGYLNHGESVKAEEFITKMKSRDIRHGPRKGN

SEQ ID NO: 1487 - protein, 205 aa, Triticum aestivum
MSRLRLRLPRGSSSSTTVIPRLRLLRRCSSSTSTSPPSRSWSPRDAFAAATQRVRAGTLRPEDAHNLFDELLRQATPVPERSLNGFLAALARAPVSGACIRDGSALAVSLFNRVCREEAGAQVAALTGCTYSILMDCCCRARRPDLGLALFGRFLKKGLKTDQIVASTFLKCLCYAKRTDEAVNVVLHRMSELGCVPNALSTCSR

SEQ ID NO: 1488 - protein, 205 aa, Triticum aestivum; identical to SEQ ID NO: 1487

SEQ ID NO: 1489 - protein, 205 aa, Triticum aestivum; identical to SEQ ID NO: 1487

SEQ ID NO: 1490 - protein, 205 aa, Triticum aestivum; identical to SEQ ID NO: 1487

SEQ ID NO: 1491 - protein, 196 aa, Triticum aestivum
MFHQMIKSGITVPVSIYTIILRGLCKNNCAGEAITMFQELRAMNVKFDIITLNTMINAMYKVQRREEAKGLFAAISASGLMPDAYTYNVMINNLLKEGSVEEVDNMFSLMEKSGCAPSSHLVNDIIRRLLEKGEIAKAGNYLSKVDGKIISLEDSTISLLSSLFSSKGKYRENIKLLPANYHFLDGFSGIAHETNS

SEQ ID NO: 1492 - protein, 196 aa, Triticum aestivum; identical to SEQ ID NO: 1491

SEQ ID NO: 1493 - protein, 196 aa, Triticum aestivum; identical to SEQ ID NO: 1491

SEQ ID NO: 1494 - protein, 196 aa, Triticum aestivum; identical to SEQ ID NO: 1491

SEQ ID NO: 1495 - protein, 196 aa, Triticum aestivum; identical to SEQ ID NO: 1491

SEQ ID NO: 1496 - protein, 196 aa, Triticum aestivum; identical to SEQ ID NO: 1491

SEQ ID NO: 1497 - protein, 187 aa, Triticum aestivum
MVESGVSVCIDTYSIVLGGLCRNNCSGEAIMLFQKLSTMDVKFNIIIVNIMIDAFYKVQRNQEAKDLFAAVSANGLVANVFTYTIMMKNLIKEGSVEEADDLFLSMEKSGCTADSYMLNLIVRMLLEKGELVKAGNYMSKVDAKSYSLEAETVSLLISLFSGKGKYREHIGLLPTKYQFREEAAAVE

SEQ ID NO: 1498 - protein, 212 aa, Triticum aestivum
MSRRYTITLISRLRVPRRCSSSTSISPPSRSWSPRDAFAAATERVRAGTLSPEDAHNLFDELLRQGTPVPERSLNGFLAALTRATSSNACIKDGPALALALFTRGCREEAGPQVAVPTVWTYNILMDCCCRARRPDLGLALFGCILRTGLKIDQITANTLLKCLCYAKRTEEAVYVLLHSMSKLGCVPDAFAYNIVLKSLCVLGKQLVFPWP

SEQ ID NO: 1499 - protein, 212 aa, Triticum aestivum; identical to SEQ ID NO: 1498

SEQ ID NO: 1500 - protein, 212 aa, Triticum aestivum; identical to SEQ ID NO: 1498

SEQ ID NO: 1501 - protein, 212 aa, Triticum aestivum; identical to SEQ ID NO: 1498

SEQ ID NO: 1502 - protein, 211 aa, Triticum aestivum
MSRRYTITLISRLRVPRRCSSSTSISPPSRSWSPRDAFAAATERVRAGTLSPEDAHNLFDELLRQGTPVPERSLNGFLAALTRATSSNACIKDGPALALALFTRGCREEAGPQVAVPTVWTYNILMDCCCRARRPDLGLALFGCILRTGLKIDQITANTLLKCLCYAKRTEEAVYVLLHSMSKLGCVPDAFAYNIVLKSLCVLGKLVFPWP

SEQ ID NO: 1503 - protein, 211 aa, Triticum aestivum; identical to SEQ ID NO: 1502

SEQ ID NO: 1504 - protein, 223 aa, Triticum aestivum
MSRLQPRSFSSSASSRANELLDEFKYHLGSGTLWPELAHQLLDELQRQPVPVSARALNGLFAALADAPPSANCTDGPALAINLFNRHRISPDIYTYNILIECCHRACRPDLGPAFFGRLLKTGVTMSVITYSSYGESFGVDPLPSASSSSYGESFCSPGLGVDGTLVSCSFLKAAAGNSSWWRGCWWRGGFGLLLGAAPCFAGPADGFFGGAVLHPFIDGDGS

SEQ ID NO: 1505 - protein, 223 aa, Triticum aestivum; identical to SEQ ID NO: 1504

SEQ ID NO: 1506 - protein, 223 aa, Triticum aestivum; identical to SEQ ID NO: 1504

SEQ ID NO: 1507 - protein, 223 aa, Triticum aestivum
MSRLQPRSFSSSASSRANELLDEFKYHLGSGTLWPELAHQLLDELQRQPVPVSARALNGLFAALADAPPSANCTDGPALAINLFNRHRISPDIYTYNILIECCHRACRPDLGPAFFGRLLKTGVTMSVITYSSYGESFGVDPLPSASSSSYGESFCSPGLDVDGTLVSCSFLKAAAGNSSWWRGCWWRGGFGLLLGAAPCFAGPADGFFGGAVLHPFIDGDGS

SEQ ID NO: 1508 - protein, 89 aa, Triticum aestivum
MNCCCRVRRPDLGLAYFGRLLRTGLKTNEVVASTVLKCLCFAKRTDEAVDVLLHRTSVLGCVPNSFSYNIVLKSLCETAGASKRSACSR

SEQ ID NO: 1509 - protein, 220 aa, Triticum aestivum
MPRVRPGSSSGTVSSHANQLLNKLKDHVGSGTLQPERAHQLFDKLLRQAVPISACALNGLFAALARALPSAACTDGPALAIALFNRMAREGRWVIAPNMYTYTILIDCSCRSRRPDLGPAFFGRLLKTGITADVCTFSSLFKCLCDMKRIDEAVGVLLHRMPGDMPDVISYSTILKGFCNEGRSQLALDLLQMMVKKGAGQSPDVVSYNMVINGFFKEVK

SEQ ID NO: 1510 - protein, 220 aa, Triticum aestivum; identical to SEQ ID NO: 1509

SEQ ID NO: 1511 - protein, 220 aa, Triticum aestivum; identical to SEQ ID NO: 1509

SEQ ID NO: 1512 - protein, 220 aa, Triticum aestivum; identical to SEQ ID NO: 1509

SEQ ID NO: 1513 - protein, 220 aa, Triticum aestivum; identical to SEQ ID NO: 1509

SEQ ID NO: 1514 - protein, 220 aa, Triticum aestivum; identical to SEQ ID NO: 1509

SEQ ID NO: 1515 - protein, 196 aa, Triticum aestivum
MTRLYSTTACARRVRIRCCCRLSSTTSPPSRTWSPRAAFAVATEHVRAGTLSRPDAHRLFGELLRRDTPVPSRSLNGLLPVLARSTSSAYVPRHRWARPRRRPLQPHAPSGSRPACGASRSVHLLMDCCCRARRPDLGLAFLGRLLRTGLKTDQVVANNFLKCLCYAKRTDEDVDVLLHRMPDLGCVPNAVSCNIQ

SEQ ID NO: 1516 - protein, 209 aa, Triticum aestivum
MSRNGVEPTMITYNIQMDYLCKSGRCIEARKMFDSMVSLGQKPTVTTYNILLHGYAMERSFHDMNCLIELMDYNGIKPDHYGYNKLISSSAKKEMVGEVLHIFTKMRQQGLNPNVVNYGTVINLLSSIGRMDDAMSQFNQMITEGLAPDIIVSTPLLVVSVLVANGRRFMNYFLRCWIAASVQTQCSSTLLWITFAKMEGLWKPKMCST

SEQ ID NO: 1517 - protein, 209 aa, Triticum aestivum; identical to SEQ ID NO: 1516

SEQ ID NO: 1518 - protein, 209 aa, Triticum aestivum; identical to SEQ ID NO: 1516

SEQ ID NO: 1519 - protein, 208 aa, Triticum aestivum
MYKIILDGLFCSGRTVCAKEKFNTMTESGIPVGVDTYNIVLSGLCRNNCTDEAIELFKKLRATNVKIDVITFNTMISAMFKTRRIEEAKDLFATISAIGLVPSVVTYSVMMTNFIKEGLLAEADDMFLTMEKASCAPNSSLLNQVVRALLEKGAVVKAATYLAKLDAKQLSVEASTISLIVSLFSREGKLREHVELLPVKYQPPEMSV

SEQ ID NO: 1520 - protein, 214 aa, Triticum aestivum
MPRARPGSSSSSVSSRADQLLNKLKDHLGPRTLQPERAHQLFDKLLRQTVPVSAFALNGLFAVLARALPSAACTDGPALAIALFNRMNREGHQVIAPTNHAYNILIDCCCRSRFPGLGPAFFGRLLKTGIKANIITFHSLFKCQCDIKQMEEALNRLLYRIPELPDSISYSIIIKSLCDNGRSQCALDLLRMKAKKGADHYPEVVAYNRVEPMA

SEQ ID NO: 1521 - protein, 214 aa, Triticum aestivum
MPRARPGSSSSSVSSRADQLLNKLKDHLGPRTLQPERAHQLFDKLLRQTVPVSAFALNGLFAVLARALPSAACTDGPALAIALFNRMNREGHQVIAPTNHAYNILIDCCCRSRFPGLGPAFFGRLLKTGIKANIITFHSLFKCQCDIKQMEEALNRLLYRIPELPDSISYSIIIKSLCDNGRSQCALDLLRMKAKKGADHYPEVVAYNREEPMA

SEQ ID NO: 1522 - protein, 214 aa, Triticum aestivum; identical to SEQ ID NO: 1521

SEQ ID NO: 1523 - protein, 214 aa, Triticum aestivum; identical to SEQ ID NO: 1521

SEQ ID NO: 1524 - protein, 214 aa, Triticum aestivum; identical to SEQ ID NO: 1521

SEQ ID NO: 1525 - protein, 214 aa, Triticum aestivum; identical to SEQ ID NO: 1521

SEQ ID NO: 1526 - protein, 189 aa, Triticum aestivum
MSPLRLRPRLRPRLHARRSYSTSHPPRSQGWDPHAAFAAATERARSGNLTSKDAHHLFDQLLLQANPVNMRPPNDLLTALARAPASAACSNGPALAVALFSRLSQGARQRVVQPTACTHGILMDCCCRANRQDLALAFFGRLLRTGLKAGVIEVNTLLKGLCRAKRADEALDILLHRMPELGCTPDVVA

SEQ ID NO: 1527 - protein, 189 aa, Triticum aestivum; identical to SEQ ID NO: 1526

SEQ ID NO: 1528 - protein, 178 aa, Triticum aestivum
MIDTGVRQGTSVYGSLIQGFCTHGDLVKGKELVTEMMNKGIPPPDIKFFHSIMQNLCTEGRVIEARDILDLIAQIGMRPDVCTFNLLIGGYFLVRKIEHTSKIFDDMVSYGLKPCNITYGILINGYCKNGRIDHGLILFKDMLRKGLKPTTFNYSPSPLASPPWNSLNSKIFYILYLY

SEQ ID NO: 1529 - protein, 192 aa, Triticum aestivum
MDKAEVVLRQMVGNGVRPDIFTYTSLIHGYSISGQFEEVVRLLEKMRSQGVKPTVFTCNTVMDYLCKHGRIKEAAEFFYSMAEKGHKPNTVSYAIMLHGYAKEGSLVDMTNLCELMAGDGIIPNICIFNILISAYAKCGIMDVAMLFFEDMLKQGVNPDEVTYLAMIAGYCSMGSIVLVSLTCAKISEYNRS

SEQ ID NO: 1530 - protein, 192 aa, Triticum aestivum; identical to SEQ ID NO: 1529

SEQ ID NO: 1531 - protein, 192 aa, Triticum aestivum; identical to SEQ ID NO: 1529

SEQ ID NO: 1532 - protein, 192 aa, Triticum aestivum; identical to SEQ ID NO: 1529

SEQ ID NO: 1533 - protein, 192 aa, Triticum aestivum; identical to SEQ ID NO: 1529

SEQ ID NO: 1534 - protein, 192 aa, Triticum aestivum; identical to SEQ ID NO: 1529

SEQ ID NO: 1535 - protein, 185 aa, Triticum aestivum
MSPLRLRLRLHARHSSSASQPSRRQGWDPHAAFAAATECARSGNLTPEDAHHLFNELLRQGNPVLGRPLNNLLAALARAPASSACRDGPALAVALFSRISQGARLRVLHPTACTYGILMDCCCRANRQDLALAFFGRLLRTGLKAGVIEVNTLLKGLCRAKRADEALDILLHRMPELGCTPDVVA

SEQ ID NO: 1536 - protein, 185 aa, Triticum aestivum; identical to SEQ ID NO: 1535

SEQ ID NO: 1537 - protein, 185 aa, Triticum aestivum; identical to SEQ ID NO: 1535

SEQ ID NO: 1538 - protein, 185 aa, Triticum aestivum; identical to SEQ ID NO: 1535

SEQ ID NO: 1539 - protein, 202 aa, Triticum aestivum
MPRFSSSTPMSPARLRLLRLCARHSSSTSHPSRIWDPHAAFAAATQRARSGTLTTEDAHHLFDELLRQGNHVQERPLNNFLAALARAPASPFCSDGPALAVALFGRLSRGAGRRVAQPNVFTYGVLMDCCCRARRLDLAIAFFARLLKTGLEAGQVVFGTLLKGLCHAKRSDEALDVLLHRMPELGCIPTKYQFLEEAATVE

SEQ ID NO: 1540 - protein, 202 aa, Triticum aestivum; identical to SEQ ID NO: 1539

SEQ ID NO: 1541 - protein, 206 aa, Triticum aestivum
MTDLCELMARDGIVPYLHCFSILINAYAKCGMIDVAILFFKDMLKQGVNPDEVTYLAVIAGYCRVGMMDDAMEKFNEMIDMGVPHNATVYRCMIQGYLNHGDFLKAKELITEMKTKGIHPRCGKAKELIQGSSGSVDNIPVARGLHYTKISMMDKHCTSKTKTSKLFVGAMTPMTPPLDPPLTQGTSCHNSFTGACSRVVFIMVIT

SEQ ID NO: 1542 - protein, 206 aa, Triticum aestivum; identical to SEQ ID NO: 1541

SEQ ID NO: 1543 - protein, 206 aa, Triticum aestivum; identical to SEQ ID NO: 1541

SEQ ID NO: 1544 - protein, 206 aa, Triticum aestivum; identical to SEQ ID NO: 1541

SEQ ID NO: 1545 - protein, 206 aa, Triticum aestivum; identical to SEQ ID NO: 1541

SEQ ID NO: 1546 - protein, 206 aa, Triticum aestivum; identical to SEQ ID NO: 1541

SEQ ID NO: 1547 - protein, 187 aa, Triticum aestivum
MLDRSICPDRVFFNTDMDHLCKSGRVMEAQDIFDLMVHMGVKPFVRDYNTLIHGYCLVGKMDEGRKLLDNMCSIGLKPDDFTYSILIDGYSMKGRIDDALIVVREMLDGKVKPSIITINIMIGALLKGGRKEEAKDLFDGIWAKGLVPNVVTYSLMIQKLIEEGSLQESDDLFLLWRRMDVLPTPVH

SEQ ID NO: 1548 - protein, 187 aa, Triticum aestivum; identical to SEQ ID NO: 1547

SEQ ID NO: 1549 - protein, 161 aa, Triticum aestivum
MFQELGAMNVKFDIITLNTMINAMYKVQRREEAKGLFAAISASGLVPDAYTYNVMINNLLKEGSVEEVDNMFSLMEKSGCAPSSHLVNDITRRLLGKGEIAKAGNYLSKVDGKIISLEDSTTSLLSSLFSSKGKYRENIKLLPANYHVLDGFSRIAHENNS

SEQ ID NO: 1550 - protein, 161 aa, Triticum aestivum; identical to SEQ ID NO: 1549

SEQ ID NO: 1551 - protein, 211 aa, Triticum aestivum
MIMVFHQIIMATTYSYLLMLKKKMVDDVLHIFTKMRQQGLNPDVANYGAVINLLSSIGRMDDAMSQYNQMINEGLAPDIIVFNSLISGFYSCGKWEKVHELFSEMLDRGICPNTVFLNTIMDRLCKNERVMEAQDLFDLMVHMGVKPDVCTYSTLIGGYLFVGKMDEVSKLLDNMVSIGMEPDVITYNILMHLIYLIYIHLVCYVPWTYLI

SEQ ID NO: 1552 - protein, 158 aa, Triticum aestivum
MVDNGVRPDNVTYNSLIHGYSSSGHWKDMVRLFKEMKNRSVTPDVCTYNLLMNSLRKNGKTKDAAENFDSMAMKGLKPDTISYAIILHGYATEGCLVDMINLFNSMATDCILPDCDIFNILIDAYAKSGKLDKAMLMFKEMQKQGVSPELQMQSHIQP

SEQ ID NO: 1553 - protein, 208 aa, Triticum aestivum
MRYTVSSFIQLARQLFDEMLRQPVPISARALNGLFAALARAPPSTACTDGPALAVDLFNHMARAGRRWMTGPTVHTYNILIDCCHRACRPDLGPAFFGCLLKTGIIMSAITYSSLFKCLCDMRRTKEALNVLLHRMPDNLPNVISYSVILKSFCDSGRSQLALDLLRVMAKKGGDHSPDVMAYNMVSKACDLFHEMIQQGVVPNEGDI

SEQ ID NO: 1554 - protein, 195 aa, Triticum aestivum
MDEVSKLLENMCSIGLKLDVVTYSILIDGYSKNGRIDDALVVFREMMDGKVEPSVITFNIMIGALLKGGRKEEATDLFNGIWPKGLVPDVVTYSLMIQKLIEEGSLQESDDLFLSMEKNGCAANSHMLNAIVRSLLQKGEIPRAGTYLSKIDERRFTFEASTASLLAALASGGKGQEYKELLPEKYHYFLEQGAD

SEQ ID NO: 1555 - DNA, 2949 bp, Triticum aestivum
  source 1..2949: mol_type = genomic DNA
atgcttacaaatatcgggatacttaaaaaaataataccattttatggcttctgtggcgcgttttctagggcttgcaacaaatttatattcttggtcgatataaagttctattcttacagactgggtgatacgaatatccatatcataattttattgtacctgaaaagaactcatatattatctctgtatcaaaatattggacgtttgtacacctggaaaagcactcgtcttgctccgatttcacgacctaccaccaccaaggccatgcctcgcttctcctccaccacgcccatgtcgccactccgcctccgcctccgccgccgcctccgcgcccgccactcctcctccacctcccattcctcacgcagctgggagccccacgccgccttcgccgccgccacggagcgtgcgcgctctggcaacctcaccccggaggacgcacaccacctgttcgacgaattgctccggcagggcaatcctgtccaggaccgccccttgaacaaacttctctctgccctcgcccgtgctccggcgtccgcggcctgcagaaacggccctgcactcgcggttgctctcttcagccgcatatcccaaggtgctcgccgacgggtggcggagccaacggcctgcacctacaccatcctcatggactgttgctgccgcgcacaccgcctggatctggcgctcgccttcttcggccgtctcctcaggacgggactgaagacgggcgtcatagaagtcaacaccctcctcaaaggactctgtcactcaaagcgcgcggatgaggccatggaagtgcttcttcacaggatgcctgagctgggctgcacccctgacgtggtggcgtgtaacacggtcatccatggcttcttcaaggaaggccaagtaggcaaggcgtgcaatctgtttcatgaaatggggcagcacggcgttacacctgatgtggtgacatataactcggttatcgatgggctgtgcaaggccagagccatggacaaggcagaggtggtccttcatcagatgcttgttaatggtgtcgtacctgataaggtgacatatggcagcctcatcgatggatattactctttggcccattggaaggaggcagttaggctgttcgaggaaatgaaaagtcagagggttacaccagatgtgcatacttacaacttgtgtatccatggcttctttagggaaggccaagtaggcaaggcgtgcaatctattccatgaaatggggcagcagggcgttacacctgatgtggtgacatataattcggttatcgatgcgctgtgcaaggccagagcaatggacaaggcggagtatttccttcgtcagatggttgatagtggtgtcgtacctaataatgtgacatataatagcctcatccatggatattcctcttcaggctatcagaaggaggcggttagggtgctgaaagaaatgacaagtcagggtatcataccagatgtttttactttcaactcgcttatggcctccctttccaagaatggaagaagcaaagaagctgcagaaatttttgactccatggccatgaagggcctgaaacctgatatcgtctcgtacaatactctgcttcacgggtatgccaccgaaggatgcttagttggtatgactaatttctttaattcaatgactagagatggtattcggcctaactgtcacactttgaacatactgattaatgcatatgctaaatctggcatgatggatgaggctatggttatatttaaaggaatgcggaaacagggagtgagtccagatgtagtcacctattcaaccgtaatacatggattttgcaaaatcggtaggttggacaatgctatggtaaaatttaagcagatgactgatatgggagtacgaccgaatccaattgtttatcattccctaatccagggtttttgtacacatggggatttagtgaaagcaaaggaattggttactgaaatgaggtacaaaggtatgcgtcctcctgatattaaggtcttccatttggcaatgcagaacctatgcacggaaggaagagtaacaaaagcacgggatatccttgacttgattgtgcacataggtatgaggcctgatgttttcacatttagtttactgatcggtggatactgcttagtctgcaagatggaggatgcatcaaaaatatttgatgatatggtgtcatatggtttagaaccttctaatattacatatggtatacttattaatggctattgcaaaaacaaaaggattgacgatgggctgattctattcaaaacaatgttgcacaagggacttaaacctacaacttttaattataacgtcatactggatggattatttctggctggacgaacagttgctgcaaaagagaagtttaatgagatggttgaatctggagtaagtgtgtgcattgatacatgctctatagttcttggtggactttgtaaaaatagctgcagcagcgaagcgatcaccctgttccggaaattaagcacaatgaatgtgaaatttgatattaatattgtcaatatcattattggtgcattctacagtgtcaagagaaaccaagaggctaaggatttgtttgctgctataccagccaatggcttggttcctaatgctgttacctacaccataatgatgacaaatcttataaaagaaggttcagtggaagaagccgacaatctttttttatcaatggagaagagcggctgtactgcaaactcttggatgttaaatcatattatcagaaggttactggaaagaggagagatagtcaaggctggaaattatatgtctaaagttgatgtaaagagctactcacttgaagctaaaactgtttcactgctgatctctctgttttcaagggaagggaaatatagagaccacatcaaattgctccctacaaagtatcagtttctggaagaagcagccacagttgaa

SEQ ID NO: 1556 - DNA, 1320 bp, Triticum aestivum
  source 1..1320: mol_type = genomic DNA
atgactaatctctttaattcaatgactagagatggtattcggcctaactgtcacactttgaacatactgattaatgcatatgctaaatctggcatgatggatgaggctatgcttatatttaaaggaatgcggaaacagggagtgagtccaaatgtagtcacctattcaaccgtaatacatgggttttgcaaaatcggtaagttggacaatgctatggtaaaatttaagcagatgactgatatgggagtacgaccgaatccaattgtttatcattccctaatccaggggttttgtacacatggggatttagtgaaagcaaaggaattggttactgaaatgaggtacaaaggtatgcgtcctcctgatattaaggtcttccatttggcaatgcagaacctatgcacggaaggaagagtaacaaaagcacgggatatccttgacttgattgtgcacataggtatgaggcctgatgttttcacatttagtatactgatcggtggatactgcttagtctgcaagatggaggatgcatcaaaaatatttgatgatatggtgtcatatggtttagaaccttctaatattacatatggtatacttattaatggctattgcaaaaacaaaaggattgacgatgggctgattctattcaaaacaatgttgcacaagggacttaaacctacaacttttaattataacgtcatactggatggattatttctggctggacgaacagttgctgcaaaagagaagtttaatgagatggttgaatctggagtaagtgtgtgcattgatacatgctctatagttcttggtggactttgtaaaaatagctgcagcagcgaagcgatcaccctgttccggaaattaagcacaatgaatgtgaaatttgatattaatattgtcaatatcattattggtgcattctacagggtcaagagaaaccaagaggctaaggatttgtttgctgctataccagccaatggcttggttcctaatgctgttacctacaccataatgatgacaaatcttataaaagaaggttcagtggaagaagccgacaatctttttttatcaatggagaagagcggctgtactgcaaactcttggatgttaaatcatattatcagaaggttactggaaagaggagagatagtcaaggctggaaattatatgtctaaagttgatgtaaagagctactcacttgaagctaaaactgtttcattgctgatctctctgttttcaagggaagggaaatatagagaccacatcaaattgctccctacaaagtttcagtttctggaagaagcagccacagttgaa

SEQ ID NO: 1557 - DNA, 2751 bp, Triticum aestivum
  source 1..2751: mol_type = genomic DNA
atgcggtcttgtttctgcaatagagcgtttatcgcgggatgtaacgagtgggcatgtggggcgtggacgctacatcggacggctatcagctcatgcatccaacgatcgtcgaggcgacggtctaaacatcggccgggcgatttattacaagttactaggaccactattttgggacggaggagggaatatgtatttgtgataaaaaaaaaaagagtggtatacctccacaagcaaagcaataccggatcctcctccaaacggctgaccagtccagtcccgtcccgcctcccccgccgctcgccgatgtccagcctccacctcctccgccaccgctcctcctccttcactcccacctcgccgccctcaccctcctggtctccgcacgccgcctttaccgctgccacagagcgcgtccgcgccgggacgctcagcccggaagacgcacaccacctgttcgaccaattgctacagcagtccactccggtccccgagcaagccctgaacggcttccttgccgccctcacccgtgcccgtgcgccagacaccgaagtctgcagagacggcccctcccttgccctcacgctcttcaaccgcgtatggcgagaagaagccggccggcgggtggcgctgcccacagtccgcacctacaacattctgatgaactgctgctgccgcgtgcgtcgtccggacctagggcttgcctacttcgggcgcctcctaaggaccagcctcaaaacaaatgaggtcgtcgccaacaccgtcctcatgtgcctctgctgcgcgaaacggacagatgaagcagtaaacgtgctgcttcataggatgtctgtgctcggctgtgtgcctgatgagttctcatataacatagttctgaagagcttatgcaaagagggaaggagccagcaagcgctcaacctgctccatgtgatggcaaaaggagatggttgctcccccgacgtggtggcttataacacggtcatctatggcttctttaaggaaggtgaagtaggcaaggcatgcaatctattccatgaaatgatgcggcaaggggttgtgcctgatgtggtgacgtatagctcgattatcgatgcactgtgcaaggctggagcaatggacaaggcagagttgttccttcggcagatggttgataacagtgttcagccggatacggtgacatatactagcatgatccatggatattccactttgggccgctggaaagaggcgactaaaatgttaagagaaatgacaagcaggggccttataccaaatattgtcacttggaactcgttcatggcctccctttgcaagcatggaaaaagcaaagaagctgcagaaattttcttttccatggctgcaaggggccacaagcctgatatcgtctcctacactactcttcttcatgggtatgccaatgaaggaagctttgctgatatgatgaaactctttaattcaatggtaggcaacggtattgtagccaactgccaagttttcaacatattaattgatgcatatgctcaacgaggaatgatggacgaagctatgctcatatttactgaaatgccaggacaaggagtcaatccaaatgtagtcacctattcaattgtgatagctgcactttgcagaatgggtaggctggctgatgcaatgaataagttcagtgagatgattggtacgggagtacaaccgaacatagttgtttatcactccctagttcagggcttatgtacacatggtgatttggtgaaagcgaaggtgttgatttctgaaatgatgaataaaggtattgctcgtccaaacattgcattcttcagttcaataatgggcagtctatgcaacgaaggaaggattatgaatgcacatgatatctttgacttggttacagacataggtgtgaaacctgatgttataacatttaatatgctgatggtcggatattgcttagttggcgagatggagaaagcattcaaggtacttgatgccatggtatcagttggcattgagcctgatgttgttacttatagctcacttattagtggctattgtaagactggaaggctcgacgatggtgttacactattcagagaaatgttgcataagagaattaaacctgacactgtttcctataacaccatactggatgggttatttaatgctgggagaactgctgctgcaaggaaaatgttccatgagatgatcgaaagtggagtaatggtgagcatttctacatataatataattcttggaggactttgtagaaataattgcatggatgaagcgatcgtcctattccggaaattacgtgcagtgaatgtgaagttcaatatcacaacactcaataccatcatcaatgcattatacaatgttcaaagaagagaagaagctcatgatttgtttgctgcattaccagccagccggctggtgcctaatgcttctacttacagagtaatgatagataatcttctaaaagaaggagcagtggaagaagctgacagtatgttctcatcaatggagaagagtggttgtgctcctagctctcattttttaaattatatcatcagaatgttattggaaaaaggggagatagtcaaggccggaaaatatatgtctaaagttgatgggaagattattttgcttgaagcttcaactacttcattgctgatgtccctcttctcaaggggaggcaaataccaggagcacatactcttgctccctgcaaaatatcattttttcagtggagtgaaccacagt

SEQ ID NO: 1558 - DNA, 2448 bp, Triticum aestivum
  source 1..2448: mol_type = genomic DNA
atgtccagcctccacctcctccgccaccgctcctcctccttcactcccacctcgccgccctcaccctcctggtctccgcacgccgcctttaccgctgccacagagcgcgtccgcgccgggacgctcagcccggaagacgcacaccacctgttcgaccaattgctacagcagtccactccggtccccgagcaagccctgaacggcttccttgccgccctcacccgtgcccgtgcgccagacaccgacgtctgcagagacggcccctcccttgccctcacgctcttcaaccgcgtatggcgagaagaagccggccggcgggtggcgctgcccacagtccgcacctacaacattctgatgaactgctgctgccgcgtgcgtcgtccggacctagggcttgcctacttcgggcgcctcctaaggaccagcctcaaaacaaatgaggtcgtcgccaacaccgtcctcatgtgcctctgctgcgcgaaacggacagatgaagcagtaaacgtgctgcttcataggatgtctgtgctcggctgtgtgcctgatgagttctcatataacatagttctgaagagcttatgcaaagagggaaggagccagcaagcgctcaacctgctccatgtgatggcaaaaggagatggttgctcccccgacgtggtggcttataacacggtcatctatggcttctttaaggaaggtgaagtaggcaaggcatgcaatctattccatgaaatgatgcggcaaggggttgtgcctgatgtggtgacgtatagctcgattatcgatgcactgtgcaaggctggagcaatggacaaggcagagttgttccttcggcagatggttgataacagtgttcagccggatacggtgacatatactagcatgatccatggatattccactttgggccgctggaaagaggcgactaaaatgttaagagaaatgacaagcaggggccttataccaaatattgtcacttggaactcgttcatggcctccctttgcaagcatggaaaaagcaaagaagctgcagaaattttcttttccatggctgcaaggggccacaagcctgatatcgtctcctacactactcttcttcatgggtatgccaatgaaggaagctttgctgatatgatgaaactctttaattcaatggtaggcaacggtattgtagccaactgccaagttttcaacatattaattgatgcatatgctcaacgaggaatgatggacgaagctatgctcatatttactgaaatgccaggacaaggagtcaatccaaatgtagtcacctattcaattgtgatagcttcactttgcagaatgggtaggctggctgatgcaatgaataagttcagtgagatgattggtacgggagtacaaccgaacatagttgtttatcactccctagttcagggcttatgtacacatggtgatttggtgaaagcgaaggtgttgatttctgaaatgatgaataaaggtattactcgtccaaacattgcattcttcagttcaataatgggcagtctatgcaacgaaggaaggattatgaatgcacatgatatctttgacttggttacagacataggtgtgaaacctgatgttataacatttaatatgctgatggtcggatattgcttagttggcgagatggagaaagcattcaaggtacttgatgccatggtatcagttggcattgagcctgatgttgttacttatagctcacttattagtggctattgtaagactggaaggctcgacgatggtgttacactattcagagaaatgttgcataagagaattaaacctgacactgtttcctataacaccatactggatgggttatttaatgctgggagaactgctgctgcaaagaaaatgttccatgagatgatcgaaagtggagtaatggtgagcatttctacatataatataattcttggaggactttgtagaaataattgcatggatgaagcgatcgtcctattccggaaattacgtgcagtgaatgtgaagttcaatatcacaacactcaataccatcatcaatgcattatacaatgttcaaagaagagaagaagctcatgatttgtttgctgcattaccagccagccggctggtgcctaatgcttctacttacagagtaatgatagataatcttctaaaagaaggagcagtggaagaagctgacagtatgttctcatcaatggagaagagtggttgtgctcctagctctcattttttaaattatatcatcagaatgttattggaaaaaggggagatagtcaaggccggaaaatatatgtctaaagttgatgggaagattattttgcttgaagcttcaactacttcattgctgatgtccctcttctcaaggggaggcaaataccaggagcacatactcttgctccctgcaaaatatcattttttcagtggagtgaaccacagt

SEQ ID NO: 1559 - DNA, 2904 bp, Triticum aestivum
  source 1..2904: mol_type = genomic DNA
atggcggcggcgccgcgcgggttgcagctctgtcggagccgggggcaagagtatgttgtttctgtaacagagcgtttgttgcgggaaataacgagtgggcatgcggtcttgttttctgcaacagaacgtttgttgcgggaagtacgagtgggcatgcggtcttgtttctgcaatagagcgtttatcgcgggatgtaacgagtgggcatgtggggcgtggacgctacatcggacggctatcagctcatgcatccaacgatcgtcgaggcgacggtctaaacatcggccgggcgatttattacaagttactaggaccactattttgggacggaggagggaatatgtatttgtgataaaaaaaaaaagagtggtatacctccacaagcaaagcaataccggatcctcctccaaacggctgaccagtccagtcccgtcccgcctcccccgccgctcgccgatgtccagcctccacctcctccgccaccgctcctcctccttcactcccacctcgccgccctcaccctcctggtctccgcacgccgcctttaccgctgccacagagcgcgtccgcgccgggacgctcagcccggaagacgcacaccacctgttcgaccaattgctacagcagtccactccggtccccgagcaagccctgaacggcttccttgccgccctcacccgtgcccgtgcgccagacaccgaagtctgcagagacggcccctcccttgccctcacgctcttcaaccgcgtatggcgagaagaagccggccggcgggtggcgctgcccacagtccgcacctacaacattctgatgaactgctgctgccgcgtgcgtcgtccggacctagggcttgcctacttcgggcgcctcctaaggaccagcctcaaaacaaatgaggtcgtcgccaacaccgtcctcatgtgcctctgctgcgcgaaacggacagatgaagcagtaaacgtgctgcttcataggatgtctgtgctcggctgtgtgcctgatgagttctcatataacatagttctgaagagcttatgcaaagagggaaggagccagcaagcgctcaacctgctccatgtgatggcaaaaggagatggttgctcccccgacgtggtggcttataacacggtcatctatggcttctttaaggaaggtgaagtaggcaaggcatgcaatctattccatgaaatgatgcggcaaggggttgtgcctgatgtggtgacgtatagctcgattatcgatgcactgtgcaaggctggagcaatggacaaggcagagttgttccttcggcagatggttgataacagtgttcagccggatacggtgacatatactagcatgatccatggatattccactttgggccgctggaaagaggcgactaaaatgttaagagaaatgacaagcaggggccttataccaaatattgtcacttggaactcgttcatggcctccctttgcaagcatggaaaaagcaaagaagctgcagaaattttcttttccatggctgcaaggggccacaagcctgatatcgtctcctacactactcttcttcatgggtatgccaatgaaggaagctttgctgatatgatgaaactctttaattcaatggtaggcaacggtattgtagccaactgccaagttttcaacatattaattgatgcatatgctcaacgaggaatgatggacgaagctatgctcatatttactgaaatgccaggacaaggagtcaatccaaatgtagtcacctattcaattgtgatagctgcactttgcagaatgggtaggctggctgatgcaatgaataagttcagtgagatgattggtacgggagtacaaccgaacatagttgtttatcactccctagttcagggcttatgtacacatggtgatttggtgaaagcgaaggtgttgatttctgaaatgatgaataaaggtattgctcgtccaaacattgcattcttcagttcaataatgggcagtctatgcaacgaaggaaggattatgaatgcacatgatatctttgacttggttacagacataggtgtgaaacctgatgttataacatttaatatgctgatggtcggatattgcttagttggcgagatggagaaagcattcaaggtacttgatgccatggtatcagttggcattgagcctgatgttgttacttatagctcacttattagtggctattgtaagactggaaggctcgacgatggtgttacactattcagagaaatgttgcataagagaattaaacctgacactgtttcctataacaccatactggatgggttatttaatgctgggagaactgctgctgcaaggaaaatgttccatgagatgatcgaaagtggagtaatggtgagcatttctacatataatataattcttggaggactttgtagaaataattgcatggatgaagcgatcgtcctattccggaaattacgtgcagtgaatgtgaagttcaatatcacaacactcaataccatcatcaatgcattatacaatgttcaaagaagagaagaagctcatgatttgtttgctgcattaccagccagccggctggtgcctaatgcttctacttacagagtaatgatagataatcttctaaaagaaggagcagtggaagaagctgacagtatgttctcatcaatggagaagagtggttgtgctcctagctctcattttttaaattatatcatcagaatgttattggaaaaaggggagatagtcaaggccggaaaatatatgtctaaagttgatgggaagattattttgcttgaagcttcaactacttcattgctgatgtccctcttctcaaggggaggcaaataccaggagcacatactcttgctccctgcaaaatatcattttttcagtggagtgaaccacagt

SEQ ID NO: 1560 - DNA, 2751 bp, Triticum aestivum
  source 1..2751: mol_type = genomic DNA
atgcggtcttgtttctgcaacagagcgtttatcgcgggatgtaacgagtgggcatgtggggcgtggacgctacatcggacggctatcagctcgggcatccaacgatcgtcgaggcgacggtataaacatcagccgggcgatttattacaagttactaggaccactattttgggacggaggagggaatatgtatttgtgataaaaaaaaaaagagtggtatacctccacaagcaaagcaataccggatcctcctccaaacggctgaccagtccagtcccgtcccgcctcccccgccgctcgccgatgtccagcctccacctcctccgccaccgctcctcctccttcactcccacctcgccgccctcaccctcctggtctccgcacgccgcctttaccgctgccacagagcgcgtccgcgccgggacgctcagcccggaagacgcacaccacctgttcgaccaattgctacagcagtccactccggtccccgagcaagccctgaacggcttccttgccgccctcacccgtgcccgtgcgccagacaccgacgtctgcagagacggcccctcccttgccctcacgctcttcaaccgcgtatggcgagaagaagccggccggcgggtggcgctgcccacagtccgcacctacaacattctgatgaactgctgctgccgcgtgcgtcgtccggacctagggcttgcctacttcgggcgcctcctaaggaccagcctcaaaacaaatgaggtcgtcgccaacaccgtcctcatgtgcctctgctgcgcgaaacggacagatgaagcagtaaacgtgctgcttcataggatgtctgtgctcggctgtgtgcctgatgagttctcatataacatagttctgaagagcttatgcaaagagggaaggagccagcaagcgctcaacctgctccatgtgatggcaaaaggagatggttgctcccccgacgtggtggcttataacacggtcatctatggcttctttaaggaaggtgaagtaggcaaggcatgcaatctattccatgaaatgatgcggcaaggggttgtgcctgatgtggtgacgtatagctcgattatcgatgcactgtgcaaggctggagcaatggacaaggcagagttgttccttcggcagatggttgataacagtgttcagccggatacggtgacatatactagcatgatccatggatattccactttgggccgctggaaagaggcgactaaaatgttaagagaaatgacaagcaggggccttataccaaatattgtcacttggaactcgttcatggcctccctttgcaagcatggaaaaagcaaagaagctgcagaaattttcttttccatggctgcaaggggccacaagcctgatatcgtctcctacactactcttcttcatgggtatgccaatgaaggaagctttgctgatatgatgaaactctttaattcaatggtaggcaacggtattgtagccaactgccaagttttcaacatattaattgatgcatatgctcaacgaggaatgatggacgaagctatgctcatatttactgaaatgccaggacaaggagtcaatccaaatgtagtcacctattcaattgtgatagcttcactttgcagaatgggtaggctggctgatgcaatgaataagttcagtgagatgattggtacgggagtacaaccgaacatagttgtttatcactccctagttcagggcttatgtacacatggtgatttggtgaaagcgaaggtgttgatttctgaaatgatgaataaaggtattactcgtccaaacattgcattcttcagttcaataatgggcagtctatgcaacgaaggaaggattatgaatgcacatgatatctttgacttggttacagacataggtgtgaaacctgatgttataacatttaatatgctgatggtcggatattgcttagttggcgagatggagaaagcattcaaggtacttgatgccatggtatcagttggcattgagcctgatgttgttacttatagctcacttattagtggctattgtaagactggaaggctcgacgatggtgttacactattcagagaaatgttgcataagagaattaaacctgacactgtttcctataacaccatactggatgggttatttaatgctgggagaactgctgctgcaaagaaaatgttccatgagatgatcgaaagtggagtaatggtgagcatttctacatataatataattcttggaggactttgtagaaataattgcatggatgaagcgatcgtcctattccggaaattacgtgcagtgaatgtgaagttcaatatcacaacactcaataccatcatcaatgcattatacaatgttcaaagaagagaagaagctcatgatttgtttgctgcattaccagccagccggctggtgcctaatgcttctacttacagagtaatgatagataatcttctaaaagaaggagcagtggaagaagctgacagtatgttctcatcaatggagaagagtggttgtgctcctagctctcattttttaaattatatcatcagaatgttattggaaaaaggggagatagtcaaggccggaaaatatatgtctaaagttgatgggaagattattttgcttgaagcttcaactacttcattgctgatgtccctcttctcaaggggaggcaaataccaggagcacatactcttgctccctgcaaaatatcattttttcagtggagtgaaccacagt

SEQ ID NO: 1561 - DNA, 2751 bp, Triticum aestivum; identical to SEQ ID NO: 1560
  source 1..2751: mol_type = genomic DNA

SEQ ID NO: 1562 - DNA, 2751 bp, Triticum aestivum; identical to SEQ ID NO: 1557
  source 1..2751: mol_type = genomic DNA

SEQ ID NO: 1563 - DNA, 1512 bp, Triticum aestivum
  source 1..1512: mol_type = genomic DNA
atgctcagaaaaatgacaacccggggtcttataccagatattgttacttgcagctcgttaatgacttccctttgcaagcatggaagaagcaaagaagcgttagacattttttgttccatgactgccaaaggcctcaaacctaatatcatcgcatactctattctgcttcatggatatgccaccgaaggatgctttgttgatatgattaatctctttaattcaatggaagacaatggtattgcagccaactgttatgttttcaacatattaattgatgcatatgctaaacatggaatgatggatgaagctatgctcatatttaccgaaatgcgggaaaaaggagtgagtcctgatgtagtcacctattccactgtaataaccgcattttgcagattgcgtaggctggccgatgctatggacaagttcaatgagatgactgatatgggtgttcagccggacacaactgtttatcactccttaattcagggcttttgtatgcatggtgatttggttaaagctaaggggctggtttctgaaatgacgaacaaaggtattcctcgtcctgacattgtgttcttcagttcaataataaacactctatgcaaagaaggaagggttatggatgcacaagatatctttgaaatggttataagcatagatgggagacctgatgtcattacattcagttcactgattgacggatatggcttagtcggccagatgggtaaagcactcggagtgcttgatgccatggtatcagctggcattgagcctgatgttgttacgtatagttcacttcttgatggctattgtagaaatggaaggatcaatgatgctttgattctatttagagaaatgccgcataagagaattaaacctaacactgttacatatggcatcatactggatgggttgtttcgtgctggaagaactgttgatgcaaggaaaatgttccatgagatgatcgaaaggggtataacagtgagcatttccatatacaatataatacttggaggtctttgtagaaataattgtgcagatgaagcgatcgcactgttccagaaattaggagcaatgaatgtaaagttcaacattataacactcaataccatgattaatgcaatgttcaaggttcggagaagagaagaagctaacgatttgtttgctgcaatatcagccggtgggttggtgcctaatgcttctacttacggcataatgataaaaaatattctaaaagaaggatcagtggaagaagttgacagtatgttttcatcaatggagaagagtggtataattcccaactcctgtcttataaatattatcatcagaatgttgttggaaaaaggtgagattgccaaggccagaaattatttatctaaagttgatgggaaggtcatctcacttgaagcttcaactacttctttgttgctgtctctcttttcaaggaaagggaaatatcgggaaagcattgaattgcttcctgcaaactatcaatttttcgatggatttggt

SEQ ID NO: 1564 - DNA, 2091 bp, Triticum aestivum
  source 1..2091: mol_type = genomic DNA
atgggctgcttctgcggtgcgcgtcgcccggacctagggcttgccttatttggccacttcctcaggacaggcctcaagacaaacaagattgtggccaccaccttcctcaagtgcctctgctgcgccaaacgtacagatgaggctgtcaacgtgctgcttcataggatgcccgagcttggctgtgtgcctgatgccttctcatactccatagttttgaagagcttatgtgaaaatagcatgagtcagcgggcactcgacctgctccagatggtggctaaagggggagatgcctgctctgtcaatgtggtggcatataacacggtcatccatggcttcttcaaggagggcgaaacaggcaaggcatgcaatctattccatgaaatgatccatcaaggggttgtgcccgatgtcgtgacatttaactcgattattcatgccttgtgcaaggccagagcaatggacaaggcagagattgtccttcggcagatggttgataatggtgctcaacccaatgaagtgacatataattgcatgatccatggatattcgaaatcagggcagttaagagagggtactaaaatgctcagaaaaatgacaacccggggtcttataccagatattgttacttgcagctcgttaatgacttccctttgcaagcatggaagaagcaaagaagcgttagacattttttgttccatgactgccaaaggcctcaaacctaatatcatcgcatactctattctgcttcatggatatgccaccgaaggatgctttgttgatatgattaatctctttaattcaatggaagacaatggtattgcagccaactgttatgttttcaacatattaattgatgcatatgctaaacatggaatgatgggtgaagctatgctcatatttaccgaaatgcgggaaaaaggagtgagtcctgatgtagtcacctattccactgtaatagccgcattttgcagattgcgtaggctggccgatgctatggacaagttcaatgagatgactgatatgggtgttcagccggacacaactgtttatcactccttaattcagggcttttgtatgcatggtgatttggttaaagctaaggggctggtttctgaaatgacgaacaaaggtattcctcgtcctgacattgcgttcttcagttcaataataaacactctatgcaaagaaggaagggttatggatgcacaagatatctttgaaatggttataagcatagatgggagacctgatgtcattacattcagttcactgattgacggatatggcttagtcggccagatgggtaaagcactcggagtgcttgatgccatggtatcagctggcattgagcctgatgttgttacgtatagttcacttcttgatggctattgtagaaatggaaggatcaatgatgctttgattctatttagagaaatgccgcgtaagagaattaaacctaacactgttacatatggcatcatactggatgggttgtttcgtgctggaagaactgttgatgcaaggaaaatgttccatgagatgatcgaaaggggtataacagtgagcatttccatatgcaatataatacttggaggtctttgtagaaataattgtgcagatgaagcgatcgcactgttccagaaattaggagcaatgaatgtaaagttcaacattataacactcaatgccatgattaatgcaatgttcaaggttcggagaagagaagaagctaacgatttgtttgctgcaatatcagccagtgggttggtgcctaatgcttctacttacggcataatgataaaaaatattctaaaagaaggatcagtggaagaagttgacagtatgttttcatcaatggagaagagtggtataattcccaactcctgtcttataaatattatcatcagaatgttgttggaaaaaggtgagattgccaaggccggaaattatttatctaaagttgatgggaaggtcatctcacttgaagcttcaactacttctttgttgctgtctctcttttcaaggaaagggaaatatcgggaaagcattgaattgcttcctgcaaactatcaatttttcgatggatttggt

SEQ ID NO: 1565 - DNA, 2091 bp, Triticum aestivum; identical to SEQ ID NO: 1564
  source 1..2091: mol_type = genomic DNA

SEQ ID NO: 1566 - DNA, 1512 bp, Triticum aestivum; identical to SEQ ID NO: 1563
  source 1..1512: mol_type = genomic DNA

SEQ ID NO: 1567 - DNA, 2091 bp, Triticum aestivum; identical to SEQ ID NO: 1564
  source 1..2091: mol_type = genomic DNA

SEQ ID NO: 1568 - DNA, 2091 bp, Triticum aestivum; identical to SEQ ID NO: 1564
  source 1..2091: mol_type = genomic DNA

SEQ ID NO: 1569 - DNA, 2439 bp, Triticum aestivum
  source 1..2439: mol_type = genomic DNA
atgtccggcgtctgcctccgccgccgcctctcctccacctccacctccaacacgccaccctcaccttcctggtcaccccaggccgcctttgccgcggccacggagcgcgcccgcgccggaacgctcagccctcaagacgcacaccacctgttcgacgaattgtttcggcaggccactccggttcccgagcgctcccttgaaggattccttgccgccctcggccgtgctgcatcctctgaagcctgcagagacggcccctcccttgccctcactctcttcaaccgtctctgccgagaagaagccggccggcgggtggcgccgcccacaatctacacctacggcatcctgatgaactgctgctgccgcgtgcgtcgtccagacctagggctcgccttcttcggccgcctcctaaggaccggcctcaaaacaaatgaggtcgtcgccagcaccctcctcaagtgcctctgctgtgcaaaacgggcagatgaagctgtgaacgtgctgcttcataggatgtccgtcctcggctgtgtgcctaattccttctcatacaacatagttctaaagagcttatgtgatgacagcaggagccagcgagcgctcggcctgctccagatgatggcaaaaggaggtgtctgctcccccaacgttctgtcatataacacagtcatccacggcttctttaaggaaggtgaaatagacaaggcctgcaatctattccatgaaatgacgaagcaagggtttgtgcctaatgtggtgacatataactcggttatcaatgcattgtgcaaggcccgagcaatggacaatgcagagtcgttccttcggcagatggttgataacggtgttccacctgataaggtgacatatactagcatcatccatggatattccactttgggccgatggaaagaggcaactaaaatgttcagagaaatgacaagcaggggtcttataccagatattgtcactcggaactcattcatggactcactctgcaagcatggaagaagcaaagaagctgcagaaattttcttttccatggctgcaaggggccacaagcctgatatcgtctcctacactattcttctccatgggtatggcaatgaaggaagcttttctgatatgatgagtctctttaattcaatggaaggcggcggtattgtggccgattgccaagttttcaacatattaattgatgcatatgctaaacgaggaatgatcgacgaagctatgctcatatttactgaaatgctaggacaaggagtcaatccgagtgtagtcacctactcaactctgatagctgcactttgcagaacaggtaggctagctgatgctatggataagtttagtcagatggttggtacgggagtacaaccggacacagttgtttatcactccctaattcagggtttctgtacacatggcgatttggtcaaagcgaaggaattgatttctgaaatgatgaataaaggtattatttgtccaaacattgcattcttcaattcaatagtagacagtctatgcaaagaaggaagggttatggatgcacaccatatctttgacttggttaaagacataggtgagaaacctgatgccatcatgtttaatacgctaattgacggatattgcttagttggtgagatgggcaaagcattcatggtacttgatgtcatgacatcagctggcattgagcctgatgccattacgtatagtacacttgtcagtggatattgtaaaagtggaaggatcgatgatgggttgattctgttcagagaagaaatgttgcataagaaagttaaaccaacaattgttacatataacatcatattggaggggttatttcgtgctgggagaacagttgctgcaaagaaaatgctccatgaaattatcggaagtgggacacctgtgagcatgcatacatacgacatatttcttagaggactttgtagaaataattgcgcggatgaagcgatcgtcctattccagaaatcacgtgcaatgaatgtgaagttcaatatcacaacactcaataccatgattaatgcattctacaagggtgacagaagagaagaagctaatgatttgtttgctgcattaccagccagcgggttggtgcctaatgcttccacttacggagtaatgatacaaaaccttctaaaagaaggagcagtggaggaagctgacaatatgttctcatcaatggagaagagtggttgtgctcctagctctcgtcttgtgaatgatgtcatcagaactttattggaaaagggggagatagtcaaggccggaaaatatatgtctaaagtttatgggaagagcctatcacttgatgcttcaactagttcgttgttgttgtctctcttttcagggaatgggaaatatcgggaacaaatacaattgctccctgcaaagtaccagtttttcggtggaatcagt

SEQ ID NO: 1570 - DNA, 2439 bp, Triticum aestivum; identical to SEQ ID NO: 1569
  source 1..2439: mol_type = genomic DNA

SEQ ID NO: 1571 - DNA, 2439 bp, Triticum aestivum; identical to SEQ ID NO: 1569
  source 1..2439: mol_type = genomic DNA

SEQ ID NO: 1572 - DNA, 2439 bp, Triticum aestivum; identical to SEQ ID NO: 1569
  source 1..2439: mol_type = genomic DNA

SEQ ID NO: 1573 - DNA, 2439 bp, Triticum aestivum; identical to SEQ ID NO: 1569
  source 1..2439: mol_type = genomic DNA

SEQ ID NO: 1574 - DNA, 2439 bp, Triticum aestivum; identical to SEQ ID NO: 1569
  source 1..2439: mol_type = genomic DNA

SEQ ID NO: 1575 - DNA, 1824 bp, Triticum aestivum
  source 1..1824: mol_type = genomic DNA
atgatggcaaaaggaggtgtctgctcccccaacgttctgtcatataacacggtcatccatggcttctttaaggaaggtgaaataggcaaggcctgcaatctattccatgaaatggcgaagcaagggtttgtgcctaatgtggtgacatataactcggttatcaatgcattgtgcaaggcccgagcaatggacaatgcagagtcgttccttcggcagatggttgataacggtgttccacccgataaggtgacatatactagcatcatccatggatattccactttgggccgatggaaagaggcaactaaaatgttcagagaaacgacaagcaggggtcatataccagatattgtcactcggaactcattcatggactcactctgcaagcatggaagaagcaaagaagctgcagaaattttcttttccatggctgcaaggggccacaagcctgatatcgtctcctgcactattcttctccatgggtatggcaatgaaggaagcttttctgatatgatgagtctctttaattcaatggaaggcggcggtattgtggccgattgccaagttttcaacatattaattgctgcatatgctaaacgaggaatgatcgacgaagctatgctcatatttactgaaatgctaggacaaggagtcaatccgagtgtagtcacctactcaactctgatagctgcactttgcagaacaggtaggctagctgatgctatggataagtttagtcagatggttgatacgggagtacaaccggacacagttgtttatcactccctaattcagggtttctgtacacatggcgatttggtcaaagcgaaggaattgatttctgaaatgatgaataaaggtatgatttgtccaaacattgcattcttcaattcaatagtagacagtctatgcaaagaaggaagggttatggatgcacaccatatctttgacttggttaaagacataggtgagaaacctgatgtcatcatgtttaatacgctaattgacggatattgcttagttggtgagatgggcaaagcattcatggtacttgatgtcatgacatcagctggcattgagcctgatgccattacgtatagtacacttgtgagtggatattgtaaaagtggaaggatcgatgatgggttgattctgttcagagaagaaatgttgcataagaaagttaaaccaacaattgttacatataacatcatattggaggggttatttcgtgctgggagaacagttgctgcaaagaaaatgctccatgaaattatcggaagtgggacacctgtgagcatgcatacatacgacatatttcttagaggactttgtagaaataattgcgcgaatgaagcgatcgtcctattccagaaatcacgtgcaatgaatgtgaagttcaatatcacaacactcaataccatgattaatgcattctacaagggtgacagaagagaagaagctaatgatctgtttgctgcattaccagccagcgggttggtgcctaatgcttccacttacggagtaatgatacaaatccttctaaaggaaggagcagtggaggaagctgacaatatgttctcatcaatggagaagagtggttgtgctcctagctctcgtcttgtgaatgatgtcatcagaactttattggaaaagggggagatagtcaaggccggaaaatatatgtctaaagttgatgggaagagcatatcacttgatgcttcaactagttcgttgttgttgtctctcttttcagggaatgggaaatatcgggaacaaatacaattgctccctgcaaagtaccagtttttcggtggaatcagt

SEQ ID NO: 1576 - DNA, 2640 bp, Triticum aestivum
  source 1..2640: mol_type = genomic DNA
atgctccgccgcatccgcatctccactcctgtcatcggaggaaaaaaagctcccgtacgaactcccgacgccgatgctccgcggcatccgcacccgcctccgtcgccgcccctccccctcctgcacctagccggcgtccgttctccgcctccctctccgccactcgtccgcctccaccagtaccgcaccaccagcacgccgatgtcccgcatccacctccacctccaccaacaccgccgcctcttctcctccacctcgccgccctcgcgctcctggtctccccacgaagcctttgccgcggccacagagcgcgtccgcgccgggaatttcagctgggaagacgcacacaacctgttcgacgaattgctgcggcaggccaccccggtccccgggcgctccctcaacggcttccttgccgccctcgcccgtgcgcccgcctccgaagcctgcagagatggtcccgccctcgccctcgctctcttcaaccacgtctgccgggacgaatccggcgcgcgggtggcaccgcccacaatcttcacgtacggcattctcatgaactgctgctgtcgtgcgcatcgcccggacctagggctagccttcttcggtcgcctcctcaggacgggcctgaaggctgacctgatcgtcgccaacaccctccttaagtgtctctgccgcgcgaaacggacggatgaggctgtgaacgtgctgcttcataggatgtctgagctcggctgtgtgcctgatgccttctcatactccattgttctcaagagcttatgcgacaatggcatgagtcagcaggcgctcaacctgctccatatgatggcgaaagtaggaggtggctgctcccccgacgtggtggcgtatagcacagtcatccatggcttctttaaggaaggtgaaacaggcaaggcatgcaatctgttccatgaaatgatgcagcaaggtgttgagcccaatgtgtggacatatagttcaatcattgatgcattgtgcaaggccagagcaatggacaaggcagagctagtgcttcagcagatggttaacaaaggtgttcaacccgataatgtgacatataattgcatgatccatggatattccacatctgggcggtggaaagaggctgttaaattgtttagagaaatgaaaagccggggccttataccagataattttacttgcaactccttaatgacttacctttgtaagcatggaagaagcaaagaaggtgcagaattttttgatgccatgactgccaaagggcacagagatgtcatctcctactatattttgcttcatgggtatgccaatgaaggatgctttgctgatatgattgatctctttaattcaatggaaagaaacggtattgctgccaactgccgtgttttcaacatattaattaatggacatgctaaacgtggaatgacggatgaagctatgctgatatttacagaaatgtgggaaaaaggagtgagtcccaatgtagtcacatattccactgtaatagctgcactttccaggatgggtaggttgactgattctatggaaaaatttaatcagatgattgccatgggaattcagccaaacacagctgtttatcactccctaattcagggttgttttatgcatggtggcttggttaaagctaaggagctgatgtttgaaatgatgaacaaaggtattcctcgtcctaacattgttttcttcagttcagtaataaacagtctgtgcaaagaaggaagggttatggatgcacatgctgtctttgacttggctataggcatcggtgagaggcctaatgtcattacatttaattcactgattgacggatattgcttagttgggaagatggataaagcattcaaaatacttcatgtcatggaatcagttggtgttgagtctgatgttgttacttatagcgcacttcttgatggctattttaaaaacagaaggattgatgatgctttgactttgtttagagaaatgccgcgcaagagaattaaacctaacactgttacatatggcatcatgttgggtgggttgtttcatgctgggagaactgttgctgcaatgaaaatgttccatgagatgattgaaagtggagcaacagtgcgcatttccacatacaatataatacttggaggtctttgtcaaactaattgtgtagacgaagcgattgcactgttccagaaattgcgagcaatgaatgtgaagttcaatattgaaatattcaataccatgattgatgcaatgtacaaggttcaaagaaaagaagaagctaaggaattgtttgctgcaatatcaggcaatgggttggtgcccaatgaatatacttatgcagtaatgataagaaatcttctaaaaggcggagcagtggaagatgctgacaatatgttttcatcaatggacaacagtggcatcgttcctagttcccgtcttataaatgatatcatcagaatgttgttggaaaaaggtgagatagccaaggctggcaattatttgtctaaagttgatgggaagagtatctcacttgaagcttcaactacctcattgatgttgtctctcttttcaaggaaagggaaacatctggaggatattaagttgctccctgcaaagtatcaattttttgatggatttggt

SEQ ID NO: 1577 - DNA, 2640 bp, Triticum aestivum
  source 1..2640: mol_type = genomic DNA
atgctccgccgcatccgcatctccactcctgtcatcggaggaaaaaaagctcccgtacgaactcccgacgccgatgctccgcggcatccgcacccgcctccgtcgccgcccctccccctcctgcacctagccggcgtccgttctccgcctccctctccgccactcgtccgcctccaccagtaccgcaccaccagcacgccgatgtcccgcatccacctccacctccaccaacaccgccgcctcttctcctccacctcgccgccctcgcgctcctggtctccccacgaagcctttgccgcggccacagagcgcgtccgcgccgggaatttcagctgggaagacgcacacaacctgttcgacgaattgctgcggcaggccaccccggtccccgggcgctccctcaacggcttccttgccgccctcgcccgtgcgcccgcctccgaagcctgcagagatggtcccgccctcgccctcgctctcttcaaccacgtctgccgggacgaatccggcgcgcgggtggcaccgcccacaatcttcacgtacggcattctcatgaactgctgctgtcgtgcgcatcgcccggacctagggctagccttcttcggtcgcctcctcaggacgggcctgaaggctgacctgatcgtcgccaacaccctccttaagtgtctctgccgcgcgaaacggacggatgaggctgtgaacgtgctgcttcataggatgtctgagctcggctgtgtgcctgatgccttctcatactccattgttctcaagagcttatgcgacaatggcatgagtcagcaggcgctcaacctgctccatatgatggcgaaagtaggaggtggctgctcccccgacgtggtggcgtatagcacagtcatccatggcttctttaaggaaggtgaaacaggcaaggcatgcaatctgttccatgaaatgatgcagcaaggtgttgagcccaatgtgtggacatatagttcaatcattgatgcattgtgcaaggccagagcaatggacaaggcagagctagtgcttcagcagatggttaacaaaggtgttcaacccgataatgtgacatataattgcatgatccatggatattccacatctgggcggtggaaagaggctgttaaattgtttagagaaatgaaaagccggggccttataccagataattttacttgcaactccttaatgacttacctttgtaagcatggaagaagcaaagaaggtgcagaattttttgatgccatgactgccaaagggcacagagatgtcatctcctactatattttgcttcatgggtatgccaatgaagaatgctttgctgatatgattgatctctttaattcaatggaaagaaacggtattgctgccaactgccgtgttttcaacatattaattaatggatatgctaaacgtggaatgacggatgaagctatgctgatatttacagaaatgtgggaaaaaggagtgagtcccaatgtagtcacatattccactgtaatagctgcactttccaggatgggtaggttgactgattctatggaaaaatttaatcagatgattgccatgggaattcagccaaacacagctgtttatcactccctaattcagggttgttttatgcatggtggcttggttaaagctaaggagctgatgtttgaaatgatgaacaaaggtattcctcgtcctaacattgttttcttcagttcagtaataaacagtctgtgcaaagaaggaagggttatggatgcacatgctgtctttgacttggctataggcatcggtgagaggcctaatgtcattacatttaattcactgattgacggatattgcttagttgggaagatggataaagcattcaaaatacttcatgtcatggaatcagttggtgttgagtctgatgttgttacttatagcgcacttcttgatggctattttaaaaacagaaggattgatgatgctttgactttgtttagagaaatgccgcgcaagagaattaaacctaacactgttacatatggcatcatgttgggtgggttgtttcatgctgggagaactgttgctgcaatgaaaatgttccatgagatgattgaaagtggagcaacagtgcgcatttccacatacaatataatacttggaggtctttgtcaaactaattgtgtagacgaagcgattgcactgttccagaaattgcgagcaatgaatgtgaagttcaatattgaaatattcaataccatgattgatgcaatgtacaaggttcaaagaaaagaagaagctaaggaattgtttgctgcaatatcaggcaatgggttggtgcccaatgaatatacttatgcagtaatgataagaaatcttctaaaaggcggagcagtggaagatgctgacaatatgttttcatcaatggacaacagtggcatcgttcctagttcccgtcttataaatgatatcatcagaatgttgttggaaaaaggtgagatagccaaggctggcaattatttgtctaaagttgatgggaagagtatctcacttgaagcttcaactacctcattgatgttgtctctcttttcaaggaaagggaaacatctggaggatattaagttgctccctgcaaagtatcaattttttgatggatttggt

SEQ ID NO: 1578 - DNA, 2640 bp, Triticum aestivum; identical to SEQ ID NO: 1577
  source 1..2640: mol_type = genomic DNA

SEQ ID NO: 1579 - DNA, 2640 bp, Triticum aestivum; identical to SEQ ID NO: 1577
  source 1..2640: mol_type = genomic DNA

SEQ ID NO: 1580 - DNA, 2640 bp, Triticum aestivum; identical to SEQ ID NO: 1577
  source 1..2640: mol_type = genomic DNA

SEQ ID NO: 1581 - DNA, 2640 bp, Triticum aestivum; identical to SEQ ID NO: 1576
  source 1..2640: mol_type = genomic DNA

SEQ ID NO: 1582 - DNA, 2631 bp, Triticum aestivum
  source 1..2631: mol_type = genomic DNA
atgctccgccgcatccgcatctccactcctgtagctcccgtacggactcccgacgccgatgctccgcggcatccacacccgcctccgttgccgcccctccccctcctgcacctagccggagtccgttctccgcctccctctccgccactcgtccgcctccaccagtaccgcaccaccagcacgccgatgtcccgcatccacctccacctccacctccaccaacaccgccgcctcttctcctccacctcgccgccctcgcgctcctggtctccccacgaagcctttgccgcggccacagagcgcgtccgcgccgggaatttcagctgggaagacgcacacaacctgttcgacgaattgctgcggcaggccaccccggtccccgggcgctccctcaacggcttccttgccgccctcgcccgtgcgcccgcctccgaagcctgcagagatggccctgccctcgccctcgctctcttcaaccacgtctgccgggacgaatccggcgcgcgggtggcaccgcccacaatcttcacgtacggcattctcatgaactgctgctgtcgtgcgcatcgcccggacctagggctagccttcttcggtcgtctcctcaggacgggcctgaaggctgacctgatcgtcgccaacaccctccttaagtgtctctgccgcgcgaaacggacggatgaggctgtgaacgtgctgcttcataggatgtccgagctcggctgtgtgcctaatgccttctcatactccattgttctcaagagcttatgcgacaatggcatgagtcagcaggcactcgacctgctccatatgatggcgaaagaaggaggtgactgctcccccgacgtggtggcgtatagcacagtcatccatggcttctttaaggaaggtgaaacaggcaaggcatgcaatctgttccatgaaatgatgcagcaaggtgttgagcccaatgtgtggacatatagttcaatcattgatgcattgtgcaaggccagagcaatggacaaggcagagctagtgcttcagcagatggttaacaaaggtgttcaacccgataatgtgacatataattgcatgatccatggatattccacatctgggcggtggaaagaggctgttaaattgtttagagaaatgaaaagccggggccttataccagataattttacttgcaactccttaatgacttacctttgtaagcatggaagaagcaaagaaggtgcagaattttttgatgctatgactgccaaagggcacagagatgtcatctcctactgtattttgcttcatgggtatgccaatgaaggatgctttgctgatatgattgatctctttaattcaatggaaagaaacggtattgctgccaactgccgtgttttcaacatattaattaatggatatgctaaacgtggaatgacggaagaagctatgctgatatttacagaaatgtgggaaaaaggagtgagtcccaatgtagtcacatattccactgtaatagctgcactttccaggatgggtaggttgactgattctatggacaaatttaatcagatgattgccatgggaattcagccaaacacagctgtttatcactccctaattcagggttgttttatgcatggtggcttggttaaagctaaggagctgatgtttgaaatgatgaacaaaggtattcctcgtcctaacattgttttcttcagttcagtaataaacagtctgtgcaaagaaggaagggttatggatgcacatgctgtctttgacttggctataggcataggtgagaggcctaatgtcattacatttaattcactgattgacggatattgcttagttgggaagatggataaagcattcaaaatacttcttgtcatggaatcagttggtgttgagcctgatgttgttacttatagtgcacttcttgatggctattttaaaaacagaagcattgatgatgctttgactttttttagagaaatgccgcgcaagagaattaaacctaacactgttacatatggcatcatgttgggtgggttgtttcgtgctgggagaactgttgctgcaatgaaaatgttccatgagatgattgaaagtggagcaacagtgcgcatttccacatacaatataatacttggaggtctttgtcaaactaattgtgtagacgaagcgattgcactgttccagaaattgcgagcaatgaatgtgaagttcaatattgaaatattcaataccatgattgatgcaatgtacaaggttcaaagaaaagaagaagctaaggaattgtttgctgcaatatcaggcaatgggttggtgcccaatgaatatacttatgcagtaatgataagaaatcttctaaaaggcggagcagtggaagatgctgacaatatgttttcatcaatggacaacagtggcatcgttcctagttcccgtcttataaatgatatcatcagaatgttgttggaaaaaggtgagatagccaaggctggcaattatttgtctaaagttgatgggaagagtatctcacttgaagcttcaactacctcattgatgttgtctctcttttcaaggaaagggaaacatctggaggatattaagttgctccctgcaaagtatcaattttttgatggatttggt

SEQ ID NO: 1583 - DNA, 1101 bp, Triticum aestivum
  source 1..1101: mol_type = genomic DNA
atggctgcaaagggcctgaaacctaatatcgtctcctactctactatgcttaatgggtatgtcaaagaaggatccttcgaggatatgactgatctcttcaattcgatggtacggaatggtattgtacctaaccaccatattttcaacatacagatcaatgcatatgctaaacgtggactgatggatgaggctatgcacatgttcgaagtaatgaggcaacaaggagtaaacccaaacgtagttgactatctagtagtaatgaattcactctgcaaaatgggtaggatggatgctgctctggacaaatttaatcagatggtcaatcaaggagtttcacctaacaaagctgtttaccaatgcctggttctgggttcttgctctcatggtcattttgtgaaagccaaggaattgatttctgaagcggttaatagaggtctgtgttctaacagtgtgttcttctatcctgtaataaacgacctttgcaaggaaggaaaggtagaaggaaaggtgaaggaggcacaggatatgtttgacttcattgtaggtattggtcatcggcctgatgtgattatgtacacttcactgatggatggatattgccttgttggcaaggtggaggaagcactgagagtacttgatgctatgaagtctgctggcctccaacctgatgcttttacatatggtatacttattaatggctactgtaaaattggaaggatcgacgagggattgagtcttgtcagggaaatttcactcagtggggttaagcccacgactattatgtacaacattatacttgatgggctgttttgctctgggagaacagttcctgcaaaggaaaaattccataagatgaatgaaagtgccataccagtgggcgttggaacatacaacatagttcttagtggactttgtaaaaataattgcactgatgaagcaatagagctgttcaagaaattacgtgctgtgaacgtgaagattaatgtcataacactcactaccatgatttctgcaatgttttcacaaaagaatggatccacgctcgccttacatcttctctcttccttttgccatctcattttgtttgctcaactaaacata

SEQ ID NO: 1584 - DNA, 1101 bp, Triticum aestivum; identical to SEQ ID NO: 1583
  source 1..1101: mol_type = genomic DNA

SEQ ID NO: 1585 - DNA, 1101 bp, Triticum aestivum
  source 1..1101: mol_type = genomic DNA
atggctgcaaagggcctgaaacctaatatcgtctcctactctactatgcttaatgggtatgtcaaagaaggatccttcgaggatatgactgatctcttcaattcgatggtacggaatggtattgtacctaaccaccatattttcaacatacagatcaatgcatatgctgaacgtggactgatggatgaggctatgcacatgttcgaagtaatgaggcaacaaggagtaaacccaaacgtagttgactatctagtagtaatgaattcactctgcaaaatgggtaggatggatgctgctctggacaaatttaatcagatggtcaatcaaggagtttcacctaacaaagctgtttaccaatgcctggttctgggttcttgctctcatggtcattttgtgaaagccaaggaattgatttctgaagcggttaatagaggtctgtgttctaacagtgtgttcttctatcctgtaataaacgacctttgcaaagaaggaaaggtagaaggaaaggtgaaggaggcacaggatatgtttgacttcattgtaggtattggtcatcggcctgatgtgattatgtacacttcactgatggatggatattgccttgttggcaaggtggaggaagcactgagagtacttgatgctatgaagtctgctggcctccaacctgatgcttttacatatggtatacttattaatggctactgtaaaattggaaggatcgacgagggattgagtcttgtcagggaaatttcactcagtggggttaagcccacgactattatgtacaacattatacttgatgggctgttttgctctgggagaacagttcctgcaaaggaaaaattccataagatgaatgaaagtgccataccagtgggcgttggaacatacaacatagttcttagtggactttgtaaaaataattgcactgatgaagcaatagagctgttcaagaaattacgtgctgtgaacgtgaagattaatgtcataacactcactaccatgatttctgcaatgttttcacaaaagaatggatccacgctcgccttacatcttctctcttccttttgccatctcattttgtttgctcaactaaacata

SEQ ID NO: 1586 - DNA, 651 bp, Triticum aestivum
  source 1..651: mol_type = genomic DNA
atgcgctggtcgcccacactctgtacctattccatcctcatgtactgctgctgccgtgcaggccgcccggacttggtggttgccttcttcggccgcatcctcaggttggggctgcgcttggacgtcatctccttaaacaatctcctcaaggggctttgccaggctaagcgctcaaatgaggcattggatctgctgctccaccggatgcccgaactacactgtgcgcctgatgtcttctcgtacaacatagtaatcaacggctgcttgaaagaaggtgaagtagacaaagcgtgcaatctcttccatgagatgccccaactgggagttcaacctgatgtggtgacctacacctcaatcatggacgcactaagcaagtccggagcaatggacaaggcagaagtgctccttcggcaaatggttgatcaaggaattgaacccaatatcaggacatatagctgtctgatccatggatattctacttttggtcagtggaaggaggcacttagggtattcaaagaaatggcaactcttggtgttgtaccagacgttgtcacgttgagctcattaatcgattccctttgcaagcacagaaggacaaaggaagctagagaaatttttgactctatatatggctgcaaagggcctgaaacc

SEQ ID NO: 1587 - DNA, 2319 bp, Triticum aestivum
  source 1..2319: mol_type = genomic DNA
atgtcaaccgcccgcctgtcctccaccttcacctcctccttcaaggctccttcacggaaaccacgagccccccgcctcgccgccttggctgccgccacggagcgcgtccgcgccggaacgctaagtcggcaggacgcgcaccacctgttcgacgaattgctgagccaagccgcgacagtcccagtacgcacgctcaacaattttcttgccgccctcgcccgtgctccgccctcagctgcctgtggcgatggccctgcccttgccgtcaccctcttcaaccgcatgtcccgaggcgctggtgcacgggtggtgtcgcccacgctctgtacctattccatcctcatggactgctgctgccgcgcaggccgcccggacttggtggttgccttcttcggccgcctcctcaggttggggctgcgcttggaggtcatctccttcagcaatctccttaaggggctctgccaggccaagcgtacaaatgaggcggtggacttgctgctccaccggacacctgaactggactgtgtgcctaatgtcttctcgtacagcatcgtaatcaacggctgttttaaagaaggtgaagtagacaaagcgtgcaatctcttccatgggatgatccaactgggagttcaacctaatgtggtcatctacacctcaattatcgatgcactaagcaagtgcggagccatggacaaggcagaagtggtctttcggcaaatggttgataaaggtattggacccgatgtcatgacatgcactagtctgatccatggatattccatttcgggtaggtggaaggcggcagtaagggtattcaaagagatgataagtcttggtgttgtaccagataccgtcatgtggaactcatttgtggattcactttgcaagcatagaaggacaaaggaagctagagttatttttgactccatggctgcaaagggccagaaacctgatactgtctcctactctattatgcttaacgggtatgtgaaagaaggatgctttgatgatatgaccggtctcttcaattcgatgctacagaacggtgttgtacctaaccaccatattttcaacatactgatcaatgcatatgctaaacgtggactgatggatgaggctatgcacatgttcgaagtaatgaggcaacaaggagtaaacccagatgtagttgactatctagtagtaatggattcactttgcaaaatgggtaggatggatgctgctctggacaaatttaatcagatggtcaatcaaggagtttcacctaacaaagctgtttaccaatgcctggttctgggtttttgctctcatggcgattttgtgaaagccaaggaattgatctctgaaacaattaatagaggtctgtgttctaacaatgtgttcttctatcctgtaataaacgacctgtgcaaagaaggaaaggtgaaggaggcacaggatatgtttgacttcattgtaggtattggtcagcggcccgatgtgattatgtacaattcactgatggatggatattgccttgttggcaaggtggaggaagcactgagagtacttgatgctatgaagtctgctggcctccaacctgatgctattacgtatgctatacttcttaatggctactgtaaaattggcaggatcgccgatggattgagtcttttcagggaaatgtcactcagcggggttaagcccacgactattatgtacagcattatacttgatgggctgtttcgctccgggagaacagtttctgcaaaggaaaaattcaatacgatggttgaaagtggcttaccagtggacgttcgcacatacaacatagttcttcatggactttgtagaaacaattgcactggtgaagcaatagagttgttcaaaaaattatgtgcaacgaacttgaagattaatgtcataacattcaataccatgatttctgcaatgtttaaaactaggagaattggagaagccaaggatttgtttgctactatatcagccatcgggttggtgccttctgttgtgacttacagtgtaatgacgacgaatttcataaaagaagggttgctggcggaggctgatgatatgtttttagcaatggagaaggctggctgtgctcctgactccagactgctaaatcacgtggtcagcgtgttgctggagaatggtgcagttgtaaaggctgcaacttatctcgctaaacttgatgcaaaacagctttcacttgaagcttcgacagtttcgttaattgtatctctcttctcaaggaaagggaaattaagggagcatgtaaagttgcttccggtaaagtaccagcctcctgagatgttgggc

SEQ ID NO: 1588 - DNA, 2319 bp, Triticum aestivum
  source 1..2319: mol_type = genomic DNA
atgtcaaccgcccgcctgtcctccaccttcacctcctccttcaaggctccttcacggaaaccacgagccccccgcctcgccgccttggctgccgccacggagcgcgtccgcgccggaacgctaagtcggcaggacgcgcaccacctgttcgacgaattgctgagccaagccgcgacagtcccagtacgcacgctcaacaattttcttgccgccctcgcccgtgctccgccctcagctgcctgtggcgatggccctgcccttgccgtcaccctcttcaaccgcatgtcccgaggcgctggtgcacgggtggtgtcgcccacgctctgtacctattccatcctcatggactgctgctgccgcgcaggccgcccggacttggtggttgccttcttcggccgcctcctcaggttggggctgcgcttggaggtcatctccttcagcaatctccttaaggggctctgccaggccaagcgtacaaatgaggcggtggacttgctgctccaccggacacctgaactggactgtgtgcctaatgtcttctcgtacagcatcgtaatcaacggctgttttaaagaaggtgaagtagacaaagcgtgcaatctcttccatgggatgatccaactgggagttcaacctaatgtggtcatctacacctcaattatcgatgcactaagcaagtgcggagccatggacaaggcagaagtggtctttcggcaaatggttgataaaggtattggacccgatgtcatgacatgcactagtctgatccatggatattccatttcgggtaggtggaaggcggcagtaagggtattcaaagagatgataagtcttggtgttgtaccagataccgtcatgtggaactcatttgtggattcactttgcaagcatagaaggacaaaggaagctagagttatttttgactccatggctgcaaagggccagaaacctgatactgtctcctactctattatgcttaacgggtatgtgaaagaaggatgctttgatgatatgaccggtctcttcaattcgatgctacagaacggtgttgtacctaaccaccatattttcaacatactgatcaatgcatatgctaaacgtggactgatggatgaggctatgcacatgttcgaagtaatgaggcaacaaggagtaaacccagatgtagttgactatctagtagtaatggattcactttgcaaaatgggtaggatggatgctgctctggacaaatttaatcagatggtcaatcaaggagtttcacctaacaaagctgtttaccaatgcctggttctgggtttttgctctcatggcgattttgtgaaagccaaggaattgatctctgaaacaattaatagaggtctgtgttctaacaatgtgttcttctatcctgtaataaacgacctgtgcaaagaaggaaaggtgaaggaggcacaggatatgtttgacttcattgtaggtattggtcagcggcccgatgtgattatgtacaattcactgatggatggatattgccttgttggcaaggtggaggaagcactgagagtacttgatgctatgaagtctgctggcctccaacctgatgctattacgtatgctatacttcttaatggctactgtaaaattggcaggatcgccgatggattgagtcttttcagggaaatgtcactcagcggggttaagcccacgactattatgtacagcattatacttgatgggctgtttcgctccgggagaacagtttctgcaaaggaaaaattcaatacgatggttgaaagtggcttaccagtggacgttcgcacatacaacatagttcttcatggactttgtagaaacaattgcactggtgaagcaatagagttgttcaaaaaattatgtgcaacgaacgtgaagattaatgtcataacattcaataccatgatttctgcaatgtttaaaactaggagaattggagaagccaaggatttgtttgctactatatcagccatcgggttggtgccttctgttgtgacttacagtgtaatgacgacgaatttcataaaagaagggttgctggcggaggctgatgatatgtttttagcaatggagaaggctggctgtgctcccaactccaggctgctaaatcacgtggtcagagtgttgctggagaatggtgcagttgtaaaggctgcaacttatctcgctaaacttgatgcaaaacagctttcacttgaagcttcgacagtttcgttaattgtatctctcttctcaaggaaagggaaattaagggagcatgtaaagttgcttccggtaaagtaccagcctcctgagatgttggac

SEQ ID NO: 1589 - DNA, 1617 bp, Triticum aestivum
  source 1..1617: mol_type = genomic DNA
atgtcaaccgcccgcctgtcctccaccttcacctcctccttcaaggctccttcacggaaaccacgagccccccgcctcgccgccttggctgccgccacggagcgcgtccgcgccggaacgctaagtcggcaggacgcgcaccacctgttcgacgaattgctgagccaagccgcgacagtcccagtacgcacgctcaacaattttcttgccgccctcgcccgtgctccgccctcagctgcctgtggcgatggccctgcccttgccgtcaccctcttcaaccgcatgtcccgaggcgctggtgcacgggtggtgtcgcccacgctctgtacctattccatcctcatggactgctgctgccgcgcaggccgcccggacttggtggttgccttcttcggccgcctcctcaggttggggctgcgcttggaggtcatctccttcagcaatctccttaaggggctctgccaggccaagcgtacaaatgaggcggtggacttgctgctccaccggacacctgaactggactgtgtgcctaatgtcttctcgtacagcatcgtaatcaacggctgttttaaagaaggtgaagtagacaaagcgtgcaatctcttccatgggatgatccaactgggagttcaacctaatgtggtcatctacacctcaattatcgatgcactaagcaagtgcggagccatggacaaggcagaagtggtctttcggcaaatggttgataaaggtattggacccgatgtcatgacatgcactagtctgatccatggatattccatttcgggtaggtggaaggcggcagtaagggtattcaaagagatgataagtcttggtgttgtaccagataccgtcatgtggaactcatttgtggattcactttgcaagcatagaaggacaaaggaagctagagttatttttgactccatggctgcaaagggccagaaacctgatactgtctcctactctattatgcttaacgggtatgtgaaagaaggatgctttgatgatatgaccggtctcttcaattcgatgctacagaacggtgttgtacctaaccaccatattttcaacatactgatcaatgcatatgctaaacgtggactgatggatgaggctatgcacatgttcgaagtaatgaggcaacaaggagtaaacccagatgtagttgactatctagtagtaatggattcactttgcaaaatgggtaggatggatgctgctctggacaaatttaatcagatggtcaatcaaggagtttcacctaacaaagctgtttaccaatgcctggttctgggttcttgctctcatggtgattttgtgaaagccaaggaattgatttctgaagcacttaatagaggtctctgttctaacagtgtgttcttctatcctgtaataaacgacctgtgcaaagaaggaaaggtgaaggaggcacaggatatgtttgacttcattgtaggtattggtcagcggcccgatgtgattatgtacaattcactgatggatggatattgccttgttggcaaggtggaggaagcactgagagtacttgatgctatgaagtctgctggcctccaacctgatgctattatgtatggtatacttcttaatgatcac

SEQ ID NO: 1590 - DNA, 2319 bp, Triticum aestivum; identical to SEQ ID NO: 1587
  source 1..2319: mol_type = genomic DNA

SEQ ID NO: 1591 - DNA, 2319 bp, Triticum aestivum; identical to SEQ ID NO: 1588
  source 1..2319: mol_type = genomic DNA

SEQ ID NO: 1592 - DNA, 2319 bp, Triticum aestivum; identical to SEQ ID NO: 1588
  source 1..2319: mol_type = genomic DNA

SEQ ID NO: 1593 - DNA, 2361 bp, Triticum aestivum
  source 1..2361: mol_type = genomic DNA
atgcctcgcttctcctcaaccacgccaatggcgccaccccgcctcctcctccgactcggcgcccgccactcctcctccacctctcatccctcacgcatctgggatccccacgccgccttcgccgccgccgcagaccgcgcgcgctctggcaacctcaccccggaggacgcacaccacctgttcgacgaattgctgcggcagggcaatcctgtccaggagcgtcccttgaataactttctggctgccctcgcccgcgcgcccgcgtctgcatcctgcagtgattgccccgccctggccgttgccctcttcggccgtttgtcccgaggcgccggacgacgggtggtgcagccaaatgtgttcacctatggcgtcctcatggactgctgctgccgcgcgtgccgcacggatctggcgctcgccttcttcggccgtctcctcaagacgggcctggaggcagaccaagtcgtcttcagcaccctcctgaagggcctttgccacgcaaagcgggcagatgaggctctggacgtgctgcttgacaggatgcctgagctgggctgcacccctgacgtggtggcgtataccacggtcatccatggcttctttagggaaggccaagtaggcaaggcgtgcgatctgttccatgaaatggcgcagcagggcgttacacctgatgtggtgacatatagctcggttattgatgcgctgtgcaaggccaaagcaatggacaaggcagagtatttccttggtcagatggttgatagtggtgtcgtacctaataatgtgacatataatagcctcatccatggatattcctcttcaggccattcaaaggaggcggtcagggtgctgaaaaaaatgacaagtcagggtattataccagatgtttttacttgcaactcgctcatggcctccctttgcaacaacagaaaaagcaaagaagctgcagaaatttttcactccatggccatgaagggcctgaaacctgatatcgtctcgtacagtactctgcttcacgggtatgccaccgaaggatgcttagttgatatgactaatctctttaattcaatgactagagatggtattctccctaactgtcatgctttgaacatactgattaatgcatatgcgaaatctggcatgatggatgaggccatgcttatatttaaaggaatgcggaaacaaggagtgagtccagatgcagtcacatatgcaaccgtaatacatgcattctgcagaaatggtaggttggacgatgctgtgataaagtttaatcagatgattgatacaggagtacgaccggacacggctgtttatggttctctaatccagggtttttgtacacatggcgatttggtgaaatcaaaggaattggttactgaaatgatgaacaaaggtatacctcgtcctgatattaagttcttccattcaatcatgcaaaacctatgcacagaaggaagggtaatagaagcacgggatatccttggcttgatagcacacattggtatgaggcctaatgttgtcacatttagtgtactgatcggtggatactgcctagtccgcaagatggcagatgcatcgaaagtatttgatgatatggtgtcatatggtttagaaccgtctaatattacatatggtatacttattaatggctattgcaaaaacaaaaggattgacgatgggctgattctattcaaaacaatgttgcacaagggacttaaacctacaacttttaattataacgtcatactggatggattatttctggctggacgaacagttgctgcaaaagagaagtttaatgagatggttgaatctggagtaagtgtgtgcattggcacatgctctatagttcttggtggactttgtagaaatggctgcagtagcgaagcgatcaccctgttccgaaaattaagcgcaatgaatgtgaaatttgatattacaattgtcaataccattattggtgccttctacagggtcgagagaaaccaagaggctaaggatttgtttgctgctattccagccaatggcttggttcctaattctattacctacaccataatgatgacaaatcttataaaagaaggttcagtggaagaagctgacaatctttttttatcgatggagaatagcggctgtagtgccaactcttatctgttaaatcatgtcatcagaaggttactgcaaaaaggagagatagtcaaggctggaaattatatgtctaaagttgatgcaaagagcttttcacttgaagctaaaactgtttcactgctgatctctctgttttcaaggaaagggaaatatagagaacacatcaaattgctgcctacaaagtatcagtttctggaagaagccacagttgaa

SEQ ID NO: 1594 - DNA, 2361 bp, Triticum aestivum
  source 1..2361: mol_type = genomic DNA
atgcctcgcttctcctcaaccacgccaatggcgccaccccgcctcctcctccgactcggcgcccgccactcctcctccacctctcatccctcacgcatctgggatccccacgccgccttcgccgccgccgcagaccgcgcgcgctctggcaacctcaccccggaggacgcacaccacctgttcgacgaattgctgcggcagggcaatcctgtccaggagcgtcccttgaataactttctggctgccctcgcccgcgcgcccgcgtctgcatcctgcagtgattgccccgccctggccgttgccctcttcggccgtttgtcccgaggcgccggacgacgggtggtgcagccaaatgtgttcacctatggcgtcctcatggactgctgctgccgcgcgtgccgcacggatctggcgctcgccttcttcggccgtctcctcaagacgggcctggaggcagaccaagtcgtcttcagcaccctcctgaagggcctttgccacgcaaagcgggcagatgaggctctggacgtgctgcttgacaggatgcctgagctgggctgcacccctgacgtggtggcgtataccacggtcatccatggcttctttagggaaggccaagtaggcaaggcgtgcgatctgttccatgaaatggcgcagcagggcgttacacctgatgtggtgacatatagctcggttattgatgcgctgtgcaaggccaaagcaatggacaaggcagagtatttccttggtcagatggttgatagtggtgtcgtacctaataatgtgacatataatagcctcatccatggatattcctcttcaggccattcaaaggaggcggtcagggtgctgaaaaaaatgacaagtcagggtattataccagatgtttttacttgcaactcgctcatggcctccctttgcaacaacagaaaaagcaaagaagctgcagaaatttttcactccatggccatgaagggcctgaaacctgatatcgtctcgtacagtactctgcttcacgggtatgccaccgaaggatgcttagttgatatgactaatctctttaattcaatgactagagatggtattctccctaactgtcatgctttgaacatactgattaatgcatatgcgaaatctggcatgatggatgaggccatgcttatatttaaaggaatgcggaaacaaggagtgagtccagatgcagtcacatatgcaaccgtaatacatgcattctgcagaaatggtaggttggacgatgctgtgataaagtttaatcagatgattgatacaggagtacgaccggacacggctgtttatggttctctaatccagggtttttgtacacatggcgatttggtgaaatcaaaggaattggttactgaaatgatgaacaaaggtatacctcgtcctgatattaagttcttccattcaatcatgcaaaacctatgcacagaaggaagggtaatagaagcacgggatatccttggcttgatagcacacattggtatgaggcctaatgttgtcacatttagtgtactgatcggtggatactgcctagtccgcaagatggcagatgcatcgaaagtatttgatgatatggtgtcatatggtttagaaccgtctaatattacatatggtatacttattaatggctattgcaaaaacaaaaggattgacgatgggctgattctattcaaaacaatgttgcacaagggacttaaacctacaacttttaattataacgtcatactggatggattatttctggctggacgaacagttgctgcaaaagagaagtttaatgagatggttgaatctggagtaagtgtgtgcattggcacatgctctatagttcttggtggactttgtagaaatggctgcagtagcgaagcgatcaccctgttccgaaaattaagcgcaatgaatgtgaaatttgatattacaattgtcaataccattattggtgccttctacagggtcgagagaaaccaagaggctaaggatttgtttgctgctattccagccaatggcttggttcctaattctgttacctacaccataatgatgacaaatcttataaaagaaggttcagtggaagaagctgacaatctttttttatcgatggagaatagcggctgtagtgccaactcttatctgttaaatcatgtcatcagaaggttactgcaaaaaggagagatagtcaaggctggaaattatatgtctaaagttgatgcaaagagcttttcacttgaagctaaaactgtttcactgctgatctctctgttttcaaggaaagggaaatatagagaacacatcaaattgctgcctacaaagtatcagtttctggaagaagccacagttgaa

SEQ ID NO: 1595 - DNA, 2361 bp, Triticum aestivum; identical to SEQ ID NO: 1594
  source 1..2361: mol_type = genomic DNA

SEQ ID NO: 1596 - DNA, 2361 bp, Triticum aestivum; identical to SEQ ID NO: 1594
  source 1..2361: mol_type = genomic DNA

SEQ ID NO: 1597 - DNA, 2361 bp, Triticum aestivum; identical to SEQ ID NO: 1594
  source 1..2361: mol_type = genomic DNA

SEQ ID NO: 1598 - DNA, 2361 bp, Triticum aestivum; identical to SEQ ID NO: 1594
  source 1..2361: mol_type = genomic DNA

SEQ ID NO: 1599 - DNA, 2040 bp, Triticum aestivum
  source 1..2040: mol_type = genomic DNA
atggcccgggccttgccatcgccctcttcaaccgcatgtcccgaggcgctggtgcacgggtggtgtcgctgccgtgcaggccgcccggacttggtggttgccttctttggccgcctcctcagattggggctgtgcttgaatgtcatctccttgagcaacctcctcaaggggctctgccaggtcaagcgtacaaatgaggctgtggacttgctgctccaccggacacctgaactggactgtgtgcctaatgtcttctcgtacagcatcgtaatcaacggctgttttaaacaaggtgaagtagacaaagcgtgcaatctcttccatgggatgatccaactgggagttcaacctaatgtggtcatctacacctcaattatcgatgcactaagcaagtgcggagtcatggacaaggcagaagtggtctttcggcaaatggttgataaaggtattggacccgatgtcatgacatgcactagtctgatccatggatattccatttcgggtaggtggaaggcggcagtaagggtattcaaagagatgataagtcttggtgttgtaccagataccgtcatgtggaactcatttgtggattcactttgcaagcatagaaggacaaaggaagctagagttatttttgactccatggctgcaaagggccagaaacctgatactgtctcctactctattatgcttaacgggtatgtgaaagaaggatgctttgatgatatgaccggtctcttcaattcgatgctacagaacggtgttgtacctaaccaccatattttcaacatactgatcaatgcatatgctaaacgtggactgatggatgaggctatgcacatgtttgaagtaatgaggcaacaaggagtaaacccagatgtagttgactatcaaattgtaatggattcactttgcaaaatgggtaggatggatgctgctctggacaaatttaatcagatggtcaatcaaggagtttcacctgacaaagctgtttaccgatgcctggttctgggttcttgctctcatggtgattttgtgaaagccaaggaattgatttctgaagcagttaatagaggtctctgttctaacagtgtgttcttctatcctgtaataaacgacctgtgcaaagaaggaaaggtgaaggaggcacaggatatgtttgacttcattgtaggtattggtcagcggcccgatgtgattatgtacaattcactgatggatggatattgccttgttggcaaggtggaggaagcactgagagtacttgatgctatgaagtctgctggcctccaacctgatgctattacgtatgctatacttcttaatggctactgtaaaattggcaggatcgccgatggattgagtcttttcagggaaatgtcactcctcggggttaagcccacgactattatgtacaacattatacttgatgggctgtttcgctccgggagaacagtttctgcaaaggaaaaattccgtacgatgagcgaaagtggcataccagtgggcgttgacacatacaacatagttcttcatggactttgtagaaacaattgcactgatgaagcaatagagctgttcaacaaattacgtgctatgaaattgaagattaatgtcataacactcaataccatgatttctgcaatgtttaaaactaggagaattgaagaagccaaggatttgtttgctactatatcagccattgggttggtgccttctgttgtgacttacagtgtaatgatgacgaatttcataaaagaagggttgttggcagaggctgatgatatgtttttagcaatggagaaggctagctgtgctcccgactccattctgctaaatcaagtggtcagggcgttgctggaaaaaggtgcagttgtgaaggctgcaacttatctcgctaaacttgatgctaaacagctgtcagttgaagcttcaacgatttccttaatagtatctctcttctcaggggaagggaaattaagggagcacgtacagttgcttccggtaaagtaccagcctcctgagagttcggctgacaat

SEQ ID NO: 1600 - DNA, 2334 bp, Triticum aestivum
  source 1..2334: mol_type = genomic DNA
atgccgaccggccggctgtcctccatcttcaccagcaatgcaacctcctccttcagggctccttcgccacagccacgagcccccctcgccgccttggctgccgccacggagcgcgtccgcgccggaacgctaagtcggcaggacgcgcaccacctgttcgacgaattgctgagccaagccgcgacagtcccagtacgcacgctcaacaattttcttgccgccctcgcccgtgctccgccctcagctgcctgtggcgatggccctgcccttgccatcgccctcttcaaccgcatgtcccaaggcgctggtgcacgggtggtgtcgcccacgctctgtacctattccatcctcatggactgctgctgccgcgcaggccgcccggacttggtggttgccttcttcggccgcctcatcaggttggggctgcgcttgaatgtcatccccttcaacaacctcctcaaggggctttgcaaggccaagcgctcaaatgaggcattggatctgctgctccaccggatgcccgaactggactgtgcgcctgatgtcttctcgtacagcatagtaatcaacggctgttttaaagaaggtgaagtagacaaagcgtgcaatctcttccatgggatgatccaactgggagttcaacctaatgtggtcatctacacctcaattatcgatgcactaagcaagtgcggagccatggacaaggcagaagtggtctttcggcaaatggttgataaaggtattggacccgatgtcatgacatgcactagtctgatccatggatattccatttcgggtaggtggaaggcggcagtaagggtattcaaagagatgataagtcttggtgttgtaccagataccgtcatgtggaactcatttgtggattcactttgcaagcatagaaggacaaaggaagctagagttatttttgactccatggctgcaaagggccagaaacctgatactgtctcctactctattatgcttaacgggtatgtgaaagaaggatgctttgatgatatgaccggtctcttcaattcgatgctacagaacggtgttgtacctaaccaccatattttcaacatactgatcaatgcatatgctaaacgtggactgatggatgaggctatgcacatgtttgaagtaatgaggcaacaaggagtaaacccagatgtagttgactatcaaattgtaatggattcactttgcaaaatgggtaggatggatgctgctctggacaaatttaatcagatggtcaatcaaggagtttcacctgacaaagctgtttaccgatgcctggttctgggttcttgctctcatggtgattttgtgaaagccaaggaattgatttctgaagcagttaatagaggtctctgttctaacagtgtgttcttctatcctgtaataaacgacctgtgcaaagaaggaaaggtgaaggaggcacaggatatgtttgacttcattgtaggtattggtcagcggcccgatgtgattatgtacaattcactgatggatggatattgccttgttggcaaggtggaggaagcactgagagtacttgatgctatgaagtctgctggcctccaacctgatgctattacgtatgctatacttcttaatggctactgtaaaattggcaggatcgccgatggattgagtcttttcagggaaatgtcactcctcggggttaagcccacgactattatgtacaacattatacttgatgggctgtttcgctccgggagaacagtttctgcaaaggaaaaattccgtacgatgagcgaaagtggcataccagtgggcgttgacacatacaacatagttcttcatggactttgtagaaacaattgcactgatgaagcaatagagctgttcaacaaattacgtgctatgaaattgaagattaatgtcataacactcaataccatgatttctgcaatgtttaaaactaggagaattgaagaagccaaggatttgtttgctactatatcagccattgggttggtgccttctgttgtgacttacagtgtaatgatgacgaatttcataaaagaagggttgttggcagaggctgatgatatgtttttagcaatggagaaggctagctgtgctcccgactccattctgctaaatcaagtggtcagggcgttgctggaaaaaggtgcagttgtgaaggctgcaacttatctcgctaaacttgatgctaaacagctgtcagttgaagcttcaacgatttccttaatagtatctctcttctcaggggaagggaaattaagggagcacgtacagttgcttccggtaaagtaccagcctcctgagagttcggctgacaat

SEQ ID NO: 1601 - DNA, 2040 bp, Triticum aestivum
  source 1..2040: mol_type = genomic DNA
atggcccgggccttgccatcgccctcttcaaccgcatgtcccgaggcgctggtgcacgggtggtgtcgctgccgtgcaggccgcccggacttggtggttgccttctttggccgcctcctcagattggggctgtgcttgaatgtcatctccttgagcaacctcctcaaggggctctgccaggtcaagcgtacaaatgaggctgtggacttgctgctccaccggacacctgaactggactgtgtgcctaatgtcttctcgtacagcatcgtaatcaacggctgttttaaacaaggtgaagtagacaaagcgtgcaatctcttccatgggatgatccaactgggagttcaacctaatgtggtcatctacacctcaattatcgatgcactaagcaagtgcggagccatggacaaggcagaagtggtctttcggcaaatggttgataaaggtattggacccgatgtcatgacatgcactagtctgatccatggatattccatttcgggtaggtggaaggcggcagtaagggtattcaaagagatgataagtcttggtgttgtaccagataccgtcatgtggaactcatttgtggattcactttgcaagcatagaaggacaaaggaagctagagttatttttgactccatggctgcaaagggccagaaacctgatactgtctcctactctattatgcttaacgggtatgtgaaagaaggatgctttgatgatatgaccggtctcttcaattcgatgctacagaacggtgttgtacctaaccaccatattttcaacatactgatcaatgcatatgctaaacgtggactgatggatgaggctatgcacatgtttgaagtaatgaggcaacaaggagtaaacccagatgtagttgactatcaaattgtaatggattcactttgcaaaatgggtaggatggatgctgctctggacaaatttaatcagatggtcaatcaaggagtttcacctgacaaagctgtttaccgatgcctggttctgggttcttgctctcatggtgattttgtgaaagccaaggaattgatttctgaagcagttaatagaggtctctgttctaacagtgtgttcttctatcctgtaataaacgacctgtgcaaagaaggaaaggtgaaggaggcacaggatatgtttgacttcattgtaggtattggtcagcggcccgatgtgattatgtacaattcactgatggatggatattgccttgttggcaaggtggaggaagcactgagagtacttgatgctatgaagtctgctggcctccaacctgatgctattacgtatgctatacttcttaatggctactgtaaaattggcaggatcgccgatggattgagtcttttcagggaaatgtcactcctcggggttaagcccacgactattatgtacaacattatacttgatgggctgtttcgctccgggagaacagtttctgcaaaggaaaaattccgtacgatgagcgaaagtggcataccagtgggcgttgacacatacaacatagttcttcatggactttgtagaaacaattgcactgatgaagcaatagagctgttcaacaaattacgtgctatgaaattgaagattaatgtcataacactcaataccatgatttctgcaatgtttaaaactaggagaattgaagaagccaaggatttgtttgctactatatcagccattgggttggtgccttctgttgtgacttacagtgtaatgatgacgaatttcataaaagaagggttgttggcagaggctgatgatatgtttttagcaatggagaaggctagctgtgctcccgactccattctgctaaatcaagtggtcagggcgttgctggaaaaaggtgcagttgtgaaggctgcaacttatctcgctaaacttgatgctaaacagctgtcagttgaagcttcaacgatttccttaatagtatctctcttctcaggggaagggaaattaagggagcacgtacagttgcttccggtaaagtaccagcctcctgagagttcggctgacaat

SEQ ID NO: 1602 - DNA, 2715 bp, Triticum aestivum
  source 1..2715: mol_type = genomic DNA
atgcatcaaggcgttggatgcactgacccgagcggacggggacaaaatccacgcccgtcggcaacctctcacccctccctctccgttcacagtctagattcgtccgccgcctcccaggccgcycgccggcggccaggaccaccggagttcctgagtctcctttctctccgacggaggcacgcctcctcttcatcgccactgttgagggcatcggttgcaaccccgcggcggcggcgagcggttcccccgagtgcttggttagtgccgagcatcgcgggtgacgccactagagcgcggtgcggcggcgcacgcacggtcagccttcccggagggcaagacccgcggcagttgcgcgccgagctccgctggagacggccagcaatgccgaccggccggctgtcctccatcttcaccagcaatgcaacctcctccttcagggctccttcgccacagccacgagcccccctcgccgccttggctgccgccacggagcgcgtccgcgccggaacgctaagtcggcaggacgcgcaccacctgttcgacgaattgctgagccaagccgcgacagtcccagtacgcacgctcaacaattttcttgccgccctcgcccgtgctccgccctcagctgcctgtggcgatggccctgcccttgccatcgccctcttcaaccgcatgtcccaaggcgctggtgcacgggtggtgtcgcccacgctctgtacctattccatcctcatggactgctgctgccgcgcaggccgcccggacttggtggttgccttcttcggccgcctcatcaggttggggctgcgcttgaatgtcatccccttcaacaacctcctcaaggggctttgcaaggccaagcgctcaaatgaggcattggatctgctgctccaccggatgcccgaactggactgtgcgcctgatgtcttctcgtacagcatagtaatcaacggctgttttaaagaaggtgaagtagacaaagcgtgcaatctcttccatgggatgatccaactgggagttcaacctaatgtggtcatctacacctcaattatcgatgcactaagcaagtgcggagccatggacaaggcagaagtggtctttcggcaaatggttgataaaggtattggacccgatgtcatgacatgcactagtctgatccatggatattccatttcgggtaggtggaaggcggcagtaagggtattcaaagagatgataagtcttggtgttgtaccagataccgtcatgtggaactcatttgtggattcactttgcaagcatagaaggacaaaggaagctagagttatttttgactccatggctgcaaagggccagaaacctgatactgtctcctactctattatgcttaacgggtatgtgaaagaaggatgctttgatgatatgaccggtctcttcaattcgatgctacagaacggtgttgtacctaaccaccatattttcaacatactgatcaatgcatatgctaaacgtggactgatggatgaggctatgcacatgtttgaagtaatgaggcaacaaggagtaaacccagatgtagttgactatcaaattgtaatggattcactttgcaaaatgggtaggatggatgctgctctggacaaatttaatcagatggtcaatcaaggagtttcacctgacaaagctgtttaccgatgcctggttctgggttcttgctctcatggtgattttgtgaaagccaaggaattgatttctgaagcagttaatagaggtctctgttctaacagtgtgttcttctatcctgtaataaacgacctgtgcaaagaaggaaaggtgaaggaggcacaggatatgtttgacttcattgtaggtattggtcagcggcccgatgtgattatgtacaattcactgatggatggatattgccttgttggcaaggtggaggaagcactgagagtacttgatgctatgaagtctgctggcctccaacctgatgctattacgtatgctatacttcttaatggctactgtaaaattggcaggatcgccgatggattgagtcttttcagggaaatgtcactcctcggggttaagcccacgactattatgtacaacattatacttgatgggctgtttcgctccgggagaacagtttctgcaaaggaaaaattccgtacgatgagcgaaagtggcataccagtgggcgttgacacatacaacatagttcttcatggactttgtagaaacaattgcactgatgaagcaatagagctgttcaacaaattacgtgctatgaaattgaagattaatgtcataacactcaataccatgatttctgcaatgtttaaaactaggagaattgaagaagccaaggatttgtttgctactatatcagccattgggttggtgccttctgttgtgacttacagtgtaatgatgacgaatttcataaaagaagggttgttggcagaggctgatgatatgtttttagcaatggagaaggctagctgtgctcccgactccattctgctaaatcaagtggtcagggcgttgctggaaaaaggtgcagttgtgaaggctgcaacttatctcgctaaacttgatgctaaacagctgtcagttgaagcttcaacgatttccttaatagtatctctcttctcaggggaagggaaattaagggagcacgtacagttgcttccggtaaagtaccagcctcctgagagttcggctgacaat

SEQ ID NO: 1603 - DNA, 2040 bp, Triticum aestivum; identical to SEQ ID NO: 1599
  source 1..2040: mol_type = genomic DNA

SEQ ID NO: 1604 - DNA, 2334 bp, Triticum aestivum; identical to SEQ ID NO: 1600
  source 1..2334: mol_type = genomic DNA

SEQ ID NO: 1605 - DNA, 1197 bp, Triticum aestivum
  source 1..1197: mol_type = genomic DNA
atgcacaaggcagagttgttccttcggcagatggttcataacggtgttcgaccggatgaggtgacatatactagcatgatccatggatattccactttgggccggctgaaagaggtgcgtaaaattttcagagaaatgacaagccgtggtcttataccagatattgtcacttggaactcgttcatggactccctttgcaagcatggaagaaccaaagaagctgcaaaggttttcttttccatggctgcaaagggcaacaagcctaatattgtctcctacactattcttcttcatgggtatgccaatgaaggaagctttgctgatatgatgagtctcttcaattcaatgaaaggcggtggcattgtagccaactgcaaagttttcaacatattaattggtgcatatgctaaacgagggctgatagatgaagctatgctcatacttactgaaatgcggggacaaggactgagtccggatgtagtcacctattcaactctaatatctgcactttggagaatgggtaagctgactgatgctatggataggttcagtcagatggttgttggtacgggagtacagccggacacagttgtttatcactccctagttcagttcttatgtacacatggtgatttggtgaaagcgaaggagttgatttctgaaatgatgaataaaggtattgctcgtccaaacactgcactcttcagttcaataatggacagtctacgcaatgaaggaagggttatagatgcacaccatatctttgacttggttatagacataggtgagaaacctgatagcagtatgtttagtacgctgattgacggatattgcttagtcggtgagatggacaaagcatgtggagtacttgatgccatggtatcagctggcattgagcctaatgtcattacgtatagcacacttgtcagtagatattgtaaacgtggaaggatcgctaatgggttgattctgttcagacaaatgttgcataagaaagttaaacctacaactgttacatatgaaaccatactgaatggattatttcgtgctgggagaactgctgatgcgaagaaaatcttcgatgagatgatcgaaagtggaataatggtgagcatttctacatataatataattcttggaggactttgtagaaataattgcgcagatgaagcgattgtcctattccagaacgtgcaa

SEQ ID NO: 1606 - DNA, 876 bp, Triticum aestivum
  source 1..876: mol_type = genomic DNA
atgtccagcatccacctccgccactgctccactatgcccatgccccgcgtctgcctccgccgccgcctctcctcctccttctcctcctccttctccaactgcacctcgccgccctcaccaccctggtctccccacgcagcctttgccgcggccacagagcgcgtacgagccgggacgctcagcccgcaagacgcacaccacctgttcgacgtattgtttcagcaggccactcgggtccccgagcgctcccttgatggattccttgccgccctcggcggtgctgcgtcctctgaagcctgcagagacggccccgccctcgccctcgcccttttcaaccgtatcttccgagaagaagccggcatgcgggtggcgccgcccaccatcttcacttatggcatcctcatgaactgctgctgccgcgtacgtcgtccggacctagggcttgccttctttgggcgcatccttagggcgggcctgaagacaaaccagatcgcggccaacacggtcatcaagtgcctctgctgcgcaaaacatactgacgaggctgtcaatatgctgcttcataggatgtccgacctaggctgtgtgcctgatgacttctcatacaacacagttctgaagagcttgtgtgaagacggcaggagcttgcaggcgcttgacctactgctccagatggtgtccaaggaaggaggtgcctgctcccctgacacggtggcatatagcacggtcatccacggcttcttgaaggaaggcaaagtagacaaggcatgcaatctattcaatgaaatgatgcggcaaggggttgtgcctgatgtggtgacctatgtttttaaggcggtaaggcgaggcgaggcgctgggggggcgcctcactgcc

SEQ ID NO: 1607 - DNA, 1197 bp, Triticum aestivum; identical to SEQ ID NO: 1605
  source 1..1197: mol_type = genomic DNA

SEQ ID NO: 1608 - DNA, 2499 bp, Triticum aestivum
  source 1..2499: mol_type = genomic DNA
atgtccagcatccacctccgccactgctccactatgcccatgccccgcgtctgcctccgccgccgcctctcctcctccttctcctcctccttctccaactgcacctcgccgccctcaccaccctggtctccccacgcagcctttgccgcggccacagagcgcgtacgagccgggacgctcagcccgcaagacgcacaccacctgttcgacgtattgtttcagcaggccactcgggtccccgagcgctcccttgatggattccttgccgccctcggcggtgctgcgtcctctgaagcctgcagagacggccccgccctcgccctcgcccttttcaaccgtatcttccgagaagaagccggcatgcgggtggcgccgcccaccatcttcacttatggcatcctcatgaactgctgctgccgcgtacgtcgtccggacctagggcttgccttctttgggcgcatccttagggcgggcctgaagacaaaccagatcgcggccaacacggtcatcaagtgcctctgctgcgcaaaacatactgacgaggctgtcaacatgctgcttcataggatgtccgacctaggctgtgtgcctgatgacttctcatacaacacagttctgaagagcttgtgtgaagacggcaggagcttgcaggcgcttgacctactgctccagatggtgtccaaggaaggaggtgcctgctcccctgacacggtggcatatagcacggtcatccacggcttcttgaaggaaggcaaagtagacaaggcatgcaatctattcaatgaaatgatgcggcaaggggttgtgcctgatgtggtgacgtatagctcgattatcgatgcattgtgcaaagccggagcaatgcacaaggcagagttgttccttcggcagatggttcataacggtgttcgaccggatgaggtgacatatactagcatgatccatggatattccactttgggccggctgaaagaggtgcgtaaaattttcagagaaatgacaagccgtggtcttataccagatattgtcacttggaactcgctcatggactccctttgcaagcatggaagaaccaaagaagctgcaaaggttttcttttccatggctgcaaagggcaacaagcctaatattgtctcctacactattcttcttcatgggtatgccaatgaaggaagctttgctgatatgatgagtctcttcaattcaatgaaaggcggtggcattgtagccaactgcaaagttttcaacatattaattggtgcatatgctaaacgagggctgatagatgaagctatgctcatacttactgaaatgcggggacaaggactgagtccggatgtagtcacctattcaactctaatatctgcactttggagaatgggtaagctgactgatgctatggataggttcagtcagatggttgttggtacgggagtacagccggacacagttgtttatcactccctagttcagttcttatgtacacatggtgatttggtgaaagcgaaggagttgatttctgaaatgatgaataaaggtattgctcgtccaaacactgcactcttcagttcaataatggacagtctacgcaatgaaggaagggttatagatgcacaccatatctttgacttggttatagacataggtgagaaacctgatagcagtatgtttagtacgctgattgacggatattgcttagtcggtgagatggacaaagcatgtggagtacttgatgccatggtatcagctggcattgagcctaatgtcattacgtatagcacacttgtcagtagatattgtaaacgtggaaggatcgctaatgggttgattctgttcagacaaatgttgcataagaaagttaaacctacaactgttacatatgaaaccatactgaatggattatttcgtgctgggagaactgctgatgcgaagaaaatcttcgatgagatgatcgaaagtggaataatggtgagcatttctacatataatataattcttggaggactttgtagaaataattgcgcagatgaagcgattgtcctattccagaaattacgtgcaatgaatgtgaagttcaatatcacaacactcaataccatcattaatgcattgtacaaggttgaaagaagagaagaagctaatgatttgtttgctgcattaccagccagcgggttggtgcctaatgcttccacttacggagtaatggtacaaaatcttctaaaagaaggagcagtggaggaagctgacagtatgttctcatcaatggagaagagtggctgtgctcctagctctcgtcttataaatgatgtcatcagaactttattggaaaagggggagatagtcaaggctggaaaatatatgtctaaagttgatgggaagagcatctcacttgaagcttcaactagttcgttgttgttgtctctcttttcagggaatgggaaatatcggaaacaactacaattgctccctgcaaagtaccaattttttaaaggaatcagt

SEQ ID NO: 1609 - DNA, 876 bp, Triticum aestivum; identical to SEQ ID NO: 1606
  source 1..876: mol_type = genomic DNA

SEQ ID NO: 1610 - DNA, 876 bp, Triticum aestivum; identical to SEQ ID NO: 1606
  source 1..876: mol_type = genomic DNA

SEQ ID NO: 1611 - DNA, 2508 bp, Triticum aestivum
  source 1..2508: mol_type = genomic DNA
atgtccagcatccacctccgccactgctccactatgcccatgtcccgcgtctgcctccgccgccgcctctcctcctcctcctcctcctcctcctcctccttctccaactgcacctcgccgccctcaccaccctggtctccccacgccgcctttgccgcggccacagagcgcgtacgagccgggacgctcagcccgcaagacgcacaccacctgttcgacgtattgtttcagcaggccactcgggtccccgagcgctcccttgatggattccttgccgccctcggcggtgctgcgtcctccgaagcctgcagagacggccccgccctcgccctcgcccttttcaaccgtatcttccgagaagaagccggcatgcgggtggcgccgcccaccatcttcacctatggcatcctcatgaactgctgctgccgcgtacgtcgtccagacctagggcttgccttctttgggcgcatcctcagggcgggcctgaagacaaaccagatcgcggccaacaccgtcatcaagtgcctctgctacgcaaaacatactgacgaggctgtcaatatgctgcttcataggatgtccgacctcggctgtgtgcctgatgacttctcatacaacacagttctgaagagcttgtgtgaagacggcaggagcttgcaggcgcttgacctactgctccagatggtgtccaaggaaggaggtgcctgctcccctgacacggtggcatatagcacggtcatccatggcttcttgaaggaaggcaaagtagacaaggcatgcaatctattcaatgaaatgatgcggcaaggggttgtgcctgatgtggtgacgtatagctcgattatcgatgcattgtgcaaagccggagcaatgcacatggcagagttgttccttcggcagatggttgataacgatgttcgaccggatgaggtgacatatactagcatgatccatggatattccactttgggccggctgaaagaggtgcgtaaaatgttcagagaaatgacaagccgtggtcttataccagatattgtcacttggaactcgttcatagactccctttgcaagcatggaagaaccaaagaagctgcaaaggttttcttttccatggctgcaaagggcagcaagcctaatattgtctcctacactattcttcttcatgggtatgccaatgaaggaagctttgctgatatgatgagtctcttcaattcaatgaaaggcggtggcattgtagccaactgcaaagttttcaacatattaattggtgcatatgctaaacgagggctgatagatgaagctatgctcatacttactgaaatgcggggacaaggactgagtccagatgtattcacctattcaactctaatatctgcacattggagaatgggtaagctgactgatgccatggataagttcagtcagatggttgttggtacgggagtacagccggacgcagttgtttatcactccctagttcagttcttatgtacacatggtgatttggtgaaagcgaaggagttgctttctgaaatgatgaataaaagtattgctcgtccaaacactgcactcttcagttcaataatggacagtctatgcaatgaaggaagggttatagatgcacaccatatctttgacttggttatagatataggtgagaaacctgatatcagtatgtttagtatgctgattgacggatattgcttagtcggtgagatggacaaagcatgtggagtacttgatgccatggtatcagctggcattgagcctaatgtcattacgtatagcacacttgtcagtagatattgtaaacgtggaaggatcgatgatgggttgattctgttcagacaaatgttgcataagaaagttaaacctacaactgttacatatgaaaccatactgaatggattatttcgtgctgggagaactgttgatgcgaagaaaatcttcgatgagatgatcgaaagtggaataatggtgagcatttctacatataatataattcttggaggactttgtagaaataattgcgcagatgaagcgatcgtcctattccagaaattacgtgcaatgaatgtgaagttcaatatcacaacactcaataccatcattaatgcattgtacaaggttgaaagaagagaagaagctaatgatttgtttgctgcattaccagccagcgggttggtgcctaatgcttccacttacggagtaatggtacaaaatcttctaaaagaaggagcagtggaggaagctgacagtatgttctcatcaatggagaagactggctgtgctcctagctctcgtcttataaatgatgtcatcagaactttgttggaaaagggggagatagttaaggccggaaaatatatgtctaaagttgatgggaagagcatctcacttgaagcttcaactagttcgttgttgttgtctctcttttcagggaatgggaaatatcggaaacaactacaattgctccctgcaaagtaccaattttttgaaggaatcagt

SEQ ID NO: 1612 - DNA, 1197 bp, Triticum aestivum; identical to SEQ ID NO: 1605
  source 1..1197: mol_type = genomic DNA

SEQ ID NO: 1613 - DNA, 1197 bp, Triticum aestivum; identical to SEQ ID NO: 1605
  source 1..1197: mol_type = genomic DNA

SEQ ID NO: 1614 - DNA, 876 bp, Triticum aestivum; identical to SEQ ID NO: 1606
  source 1..876: mol_type = genomic DNA

SEQ ID NO: 1615 - DNA, 2499 bp, Triticum aestivum; identical to SEQ ID NO: 1608
  source 1..2499: mol_type = genomic DNA

SEQ ID NO: 1616 - DNA, 2472 bp, Triticum aestivum
  source 1..2472: mol_type = genomic DNA
atgccccgtctccgcctccgccgcttctccaccgcgccgatgttccacctcctccaccgcagctcctcctccacctccacctcgccgccctcgcgttcctggtctccccatgccgcctttgccgccgccacagagcgtgtccgtgccgggacgctcagcccagaagacgcgcaccacctgttcgacgaattgctacggcaggccaccccggtcaccgggcgctccctcaacggcttcctttccgccctcgcccgtgcgcccgcctcggccgcctgcattagagatggccccgcccttgccgtcgctctcttcaaccgcgtatgccgagaagaagccagccagcaggtggcacctttgacagtccacacctacggcatcctcatgggctgcttctgcggtgcgcgtcgcccggacctagggcttgccttattcggccgcttcctcaggacgggcctgaagacaaatgagatcatcgccaccaccttcctcaagtgcctctgctccgccaaacgtacagatgaggctgtcaacttgctgcttcataggatgcctgagcttggctgcgtgcctaatgcaatctcctactccattgttctgaagagcttatgtgaaaatagcatgagtcagcgggcactcgacttgctacagactgtggcggaaggaggaggtgcctgctctctcaatgtggtggcatatagcacagtcatccatggtttttttaaagaaggcaaaacaggcaaggcatgcaatctattccatgaaatgatacatcaaggggttgatcctgatgtggtgacgtacaacttgatcattgatgcattgtgcaaggccagagcgatggacaaggcagaactagtccttcagcagatggtcgataaaggtgttcaacccaacacagtgacatataattgcatgatccatggatattccacatcagggcagttgaaagaggctgctaaaatgtttagaaaaatgacaagccatggtcttgtaccaaatgcagtcacttgcaacttgttaatgacttccctttgcaagcatggaagaagcaaagaagcggcagaaatattttattccatgactgccaagggccacaaactggatgccgtctcgtaccgtattttgcttcatgggtatgccactgagggatgctttgctgatatgattgatctcttcaattcaatggaaagcaatggttttgtagccgattgccatgttttcaccatattaattgatgcatatgctaaacgtggaatgatggatgaagctatgctcatatttactgaaatgcgggaaaaaggagtgagtcccaatgtagtcacctattccactgtaatagccgcattttgcagattgcgtaggctggccaatgctatggacaagttcaatgagatgactgatatgggtgttcagccggacacaactgtttatcactccctaattcagggtttttgtatgcatggtgatttggttaaagttaaggaatttgtgtctgaaatgatgaacaaaggtattcctcgtcctgacattgcgttcttcaattcagtaataaactctttatgcaaagaaggaagggttatgaatgcacaaggtatctttgacttggttataggcatgggcgagaggcctaatgtcattacattcagttcactgattgacggatatggcttagtcggccagatgggtgaagcactcggagtgcttgatgccatggtgtcagctggcattgagcctaatgttgttacgtatagttcaattcttgatggctattgtagaaatggaaggatcaatgatgctttgattctattcagagaaatgccgcgcaagagaattaaacctaacactgttacatatggcatcatgctggatgggttgttccgtgctgggagaactgttgctgcaagggaaatgttccatgagatgaccgaaaggggtataccagtgagcatttccatatacaatataatacttggtggtctttgtagaaataattgtgcagacgaagcgatcacactattccagaaattaggagcaatgaatgtcaagttcgatattataacactcaataccatgattaatgcaatgttcaaggttcggagaagagaagaagctaacgatttgtttgctgcagtatcagccagtgggttggtgcctaatgcttctacttacggcatagtgataaaaaatattctaaaggaaggatcagtggaagaagttgacaatatgttttcatcaatggagaagagtggttgtgctcccagctctcgtcttataaattatatcatcagaatgttgttggaaaaaggtgagattgccagggccgggaattatttatctaaagttgatgggaagatcatctcacttgaagcttcaactacttctttgctgttgtctctcttttcaagggaagggaaatatcgggaaaacattgaattgcttcctgcaaagtatcaatttttcaatggatttggt

SEQ ID NO: 1617 - DNA, 1791 bp, Triticum aestivum
  source 1..1791: mol_type = genomic DNA
atgtggtggcatatagcacagtcatccatggttttttttaaagaaggcaaaacaggcaaggcatgcaatctattccatgaaatgatacatcaaggggttgatcctgatgtggtgacgtacaacttgatcattgatgcattgtgcaaggccagagcgatggacaaggcagaactagtccttcagcagatggtcgataaaggtgttcaacccaacacagtgacatataattgcatgatccatggatattccacatcagggcagttgaaagaggctgctaaaatgtttagaaaaatgacaagccatggtcttgtaccaaatgcagtcacttgcaacttgttaatgacttccctttgcaagcatggaagaagcaaagaagcggcagaaatattttattccatgactgccaagggccacaaactggatgccgtctcgtaccgtattttgcttcatgggtatgccactgagggatgctttgctgatatgattgatctcttcaattcaatggaaagcaatggttttgtagccgattgccatgttttcaccatattaattgatgcatatgctaaacgtggaatgatggatgaagctatgctcatatttactgaaatgcgggaaaaaggagtgagtcccaatgtagtcacctattccactgtaatagccgcattttgcagattgcgtaggctggccaatgctatggacaagttcaatgagatgactgatatgggtgttcagccggacacaactgtttatcactccctaattcagggtttttgtatgcatggtgatttggttaaagttaaggaatttgtgtctgaaatgatgaacaaaggtattcctcgtcctgacattgcgttcttcaattcagtaataaactctttatgcaaagaaggaagggttatgaatgcacaaggtatctttgacttggttataggcatgggcgagaggcctaatgtcattacattcagttcactgattgacggatatggcttagtcggccagatgggtgaagcactcggagtgcttgatgccatggtgtcagctggcattgagcctaatgttgttacatatagttcaattcttgatggctattgtagaaatggaaggatcaatgatgctttgattctattcagagaaatgccgcgcaagagaattaaacctaacactgttacatatggcatcatgctggatgggttgttccgtgctgggagaactgttgctgcaagggaaatgttccatgagatgaccgaaaggggtataccagtgagcatttccatatacaatataatacttggtggtctttgtaaaaataattgtgcagacgaagcgatcgcactattccagaaattaggagcaatgaatgtcaagttcgatattataacactcaataccatgattaatgcaatgttcaaggttcggagaagagaagaagctaacgatttgtttgctgcagtatcagccagtgggttggtgcctaatgcttctacttacggcatagtgataaaaaatattctaaaggaaggatcagtggaagaagttgacaatatgttttcatcaatggagaagagtggttgtgctcccagctctcgtcttataaattatatcatcagaatgttgttggaaaaaggtgagattgccagggccgggaattatttatctaaagttgatgggaagatcatctcacttgaagcttcaactacttctttgctgttgtctctcttttcaagggaagggaaatatcgggaaaacattgaattgcttcctgcaaagtatcaatttttcaatggatttggt

SEQ ID NO: 1618 - DNA, 1068 bp, Triticum aestivum
  source 1..1068: mol_type = genomic DNA
atgttatttcctgatgaatttttgcaaactaacaaaaaaatttgtcaaagtttggcacggaaaattttcagagtttttggaatttatttaccttttttaaaattttattttactgtttataagagagcatttgagatcgggactggatactcctcgtcccggccattctccctttctcagtgcagagccagagcacgcccatgtctcgcatccccatccgccgccgccgccgctcatcgtcctccacctagacagtgtccggcctccaccactcctcctcctcctccacctagccattctccgacctctgcctccgccacttctcctcccctgtcccccacctcgccgatgccccgtctccgcctccgccgcttctccaccgcgccgatgttccacctcctccaccgcagctcctcctccacctccacctcgccgccctcgcgttcctggtctccccatgccgcctttgccgccgccacagagcgtgtccgtgccgggacgctcagcccagaagacgcgcaccacctgttcgacgaattgctacggcaggccaccccggtcaccgggcgctccctcaacggcttcctttccgccctcgcccgtgcgcccgcctcggcctcctgcattagagatggccccgcccttgccgtcgctctcttcaaccgcgtatgccgagaagaagccagccagcaggtggcacctttgacagtccacacctacggcatcctcatgggctgcttctgcggtgcgcgtcgcccggacctagggcttgccttattcggccgcttcctcaggaagggcctgaagacaaatgagatcatcgccaccaccttcctcaagtgcctctgctccgccaaacgtacagatgaggctgtcaacttgctgcttcataggatgcctgagcttggctgcgtgcctaatgcaatctcctactccattgttctgaagagcttatgtgaaaatagcatgagtcagcgggcactcgacttgctacagactgtggcggaaggaggaggtgcctgctctctcaatgtggtggcatatagcacagtcatccatggttttttt

SEQ ID NO: 1619 - DNA, 579 bp, Triticum aestivum
  source 1..579: mol_type = genomic DNA
atgatagttcggctgtccggacaccccctagtccgggactccctcaatgaggctgtcaacttgctgcttcataggatgcctgagcttggctgcgtgcctaatgcaatctcctactccattgttctgaagagcttatgtgaaaatagcatgagtcagcgggcactcaacttgctacagacagtggcggaaggaggaggtgcctgctctctcaatgtggtggcatataacacagtcatccatggtatttttaaagaaggcaaaacaggcaaggcatgcaatctattccatgaaatgatacatcaaggggttgatcctgatgtggtgacgtacaacttgatcattgatgcattgtgcaaggccagagcgatggacaaggcagaactagtccttcagcagatggtcgataaaggtgttcaacccaacacagtgacatataattgcatgatccatggatattccacatcagggcagttgaaagaggctgctaaaatgtttagaaaaatgacaagccatggtcttgtaccaaatgcagtcacttgcaactcgttaatgacttccctttgcaagcatggaagaagc

SEQ ID NO: 1620 - DNA, 2472 bp, Triticum aestivum
  source 1..2472: mol_type = genomic DNA
atgccccgtctccgcctccgccgcttctccaccgcgccgatgttccacctcctccaccgcagctcctcctccacctccacctcgccgccctcgcgttcctggtctccccatgccgcctttgccgccgccacagagcgtgtccgtgccgggacgctcagcccagaagacgcgcaccacctgttcgacgaattgctacggcaggccaccccggtcaccgggcgctccctcaacggcttcctttccgccctcgcccgtgcgcccgcctcggccgcctgcattagagatggccccgcccttgccgtcgctctcttcaaccgcgtatgccgagaagaagccagccagcaggtggcacctttgacagtccacacctacggcatcctcatgggctgcttctgcggtgcgcgtcgcccggacctagggcttgccttattcggccgcttcctcaggacgggcctgaagacaaatgagatcatcgccaccaccttcctcaagtgcctctgctccgccaaacgtacagatgaggctgtcaacttgctgcttcataggatgcctgagcttggctgcgtgcctaatgcaatctcctactccattgttctgaagagcttatgtgaaaatagcatgagtcagcgggcactcgacttgctacagactgtggcggaaggaggaggtgcctgctctctcaatgtggtggcatatagcacagtcatccatggtttttttaaagaaggcaaaacaggcaaggcatgcaatctattccatgaaatgatacatcaaggggttgatcctgatgtggtgacgtacaacttgatcattgatgcattgtgcaaggccagagcgatggacaaggcagaactagtccttcagcagatggtcgataaaggtgttcaacccaacacagtgacatataattgcatgatccatggatattccacatcagggcagttgaaagaggctgctaaaatgtttagaaaaatgacaagccatggtcttgtaccaaatgcagtcacttgcaacttgttaatgacttccctttgcaagcatggaagaagcaaagaagcggcagaaatattttattccatgactgccaagggccacaaactggatgccgtctcgtaccgtattttgcttcatgggtatgccactgagggatgctttgctgatatgattgatctcttcaattcaatggaaagcaatggttttgtagccgattgccatgttttcaccatattaattgatgcatatgctaaacgtggaatgatggatgaagctatgctcatatttactgaaatgcgggaaaaaggagtgagtcccaatgtagtcacctattccactgtaatagccgcattttgcagattgcgtaggctggccaatgctatggacaagttcaatgagatgactgatatgggtgttcagccggacacaactgtttatcactccctaattcagggtttttgtatgcatggtgatttggttaaagttaaggaatttgtgtctgaaatgatgaacaaaggtattcctcgtcctgacattgcgttcttcaattcagtaataaactctttatgcaaagaaggaagggttatgaatgcacaaggtatctttgacttggttataggcatgggcgagaggcctaatgtcattacattcagttcactgattgacggatatggcttagtcggccagatgggtgaagcactcggagtgcttgatgccatggtgtcagctggcattgagcctaatgttgttacgtatagttcaattcttgatggctattgtagaaatggaaggatcaatgatgctttgattctattcagagaaatgccgcgcaagagaattaaacctaacactgttacatatggcatcatgctggatgggttgttccgtgctgggagaactgttgctgcaagggaaatgttccatgagatgaccgaaaggggtataccagtgagcatttccatatacaatataatacttggtggtctttgtagaaataattgtgcagacgaagcgatcacaatattccagaaattaggagcaatgaatgtcaagttcgatattataacactcaataccatgattaatgcaatgttcaaggttcggagaagagaagaagctaacgatttgtttgctgcagtatcagccagtgggttggtgcctaatgcttctacttacggcatagtgataaaaaatattctaaaggaaggatcagtggaagaagttgacaatatgttttcatcaatggagaagagtggttgtgctcccagctctcgtcttataaattatatcatcagaatgttgttggaaaaaggtgagattgccagggccgggaattatttatctaaagttgatgggaagatcatctcacttgaagcttcaactacttctttgctgttgtctctcttttcaagggaagggaaatatcgggaaaacattgaattgcttcctgcaaagtatcaatttttcaatggatttggt

SEQ ID NO: 1621 - DNA, 1017 bp, Triticum aestivum
  source 1..1017: mol_type = genomic DNA
atgcatggtgatttggttaaagttaaggaatttgtgtctgaaatgatgaacaaaggtattcctcgtcctgacattgcgttcttcaattcagtaataaactgtttatgcaaagaaggaagggttatgaatgcacaaggtatctttgacttggttataggcatgggcgagaggcctaatgtcattacattcagttcactgattgacggatatggcttagtcggccagatgggtgaagcactcggagtgcttgatgccatggtgtcagctggcattgagcctaatgttgttatgtatagttcaattcttgatggctattgtagaaatggaaggatcaatgatgctttgattctattcagagaaatgccgcgcaagagaattaaacctaacactgttacatatggcatcatgctggatgggttgttccgtgctgggagaactgttgctgcaagggaaatgttccatgagatgaccgaaaggggtatatcagtgagcatttccatatacaatataatacttagtggtctttgtagaaataattgtgcagacgaagcgatcgcactattccagaaattaggagcaatgaatgtcaagttcgatattataacactcaataccatgattaatgcaatgttcaaggttcggagaagagaagaagctaacgatttgtttgctgcagtatcagccagtgggttggtgcctactgcttctacttatggcatagtgataaaaaatattctaaaggaaggatcagtggaagaagttgacaatatattttcatcaatggagaagagtggttgtgctcccagctctcgtcttataaattatatcatcagaatgttgttggaaaaaggtgagattgccagggccgggaattatttatctaaagttgatgggaagatcatctcacttgaagcttcaactacttctttgttgttgtccctcttttcaagggaagggaaatatcgggaaaacattgaattgcttcctgcaaagtatcaatttttcaatggatttggt

SEQ ID NO: 1622 - DNA, 1068 bp, Triticum aestivum; identical to SEQ ID NO: 1618
  source 1..1068: mol_type = genomic DNA

SEQ ID NO: 1623 - DNA, 1791 bp, Triticum aestivum; identical to SEQ ID NO: 1617
  source 1..1791: mol_type = genomic DNA

SEQ ID NO: 1624 - DNA, 1791 bp, Triticum aestivum; identical to SEQ ID NO: 1617
  source 1..1791: mol_type = genomic DNA

SEQ ID NO: 1625 - DNA, 1068 bp, Triticum aestivum; identical to SEQ ID NO: 1618
  source 1..1068: mol_type = genomic DNA

SEQ ID NO: 1626 - DNA, 2472 bp, Triticum aestivum; identical to SEQ ID NO: 1616
  source 1..2472: mol_type = genomic DNA

SEQ ID NO: 1627 - DNA, 1227 bp, Triticum aestivum
  source 1..1227: mol_type = genomic DNA
atggtatcgtacggaatggatgaggctatgcacatgttcgaagtaatgaggcaacaaggagtaaacccagatgtatttggctatcaaatcataatggattcactttgcaaaatgggcaagatggctgctgctatggatatatttaatcagatggtcaatcaaggagtttcacctaacaaagctgtttaccaatgcctggttctgggttcttgctctcatggtcattttgtgaaagccaaggaattgatttctgaagcggttaatagaggtctgtgttctaacagtgtgttcttctatcctgtaataaacgaccgttgcaaagaaggaaaggtgaaggaggcacaggatatgtttgacttcattgtaggtattggtcatcggcctgatgtgattatgtacaattcactgatggatggatattgccatgttggcaaggtggaggaagcactgagagtacttgatgctatgaagtctgctggcctccaacctgatgtttttacatatggtatacttattaatggctactgtaaaattggaaggatcgacgagggattgagtcttgtcagggaaatttcactcagtggggttaagcccacgactattatgtacaacattatacttgatgggctgttttgctctgggagaacagttcctgcaaaggaaaaattccataagatgaatgaaagtggcataccagtgggcgttggaacatacaacatagttcttagtggactttgtaaaaataattgcactgatgaagcaatagagctgttcaagaaattacgtgctgtgaacgtgaagattaatgtcataacactcactaccatgatttctgcaatgtttaaaactaggagaattgaagaagccaaggatttgtttgctactatatcagccattgggttggtgccttctgttgtgacttacagtataatgatgacaaatttcataaaagaagggttgcttgcagatgctgatgatatgttttcagcaatggagaaggctggctgtgctcacaactccagactgctaaatcaagtggtcagggtatttctgaagaatggtgaagttgtaaaggctgtgacttatcttgccaaacttgatgcaaaacagctgtcagttgaagcttcgacggtttcgttaatagtatctctcttctcaaggaaagggaaattaagggagcatgtaaaattgcttccggtaaagtaccagcctcctgagatgttggac

SEQ ID NO: 1628 - DNA, 1227 bp, Triticum aestivum; identical to SEQ ID NO: 1627
  source 1..1227: mol_type = genomic DNA

SEQ ID NO: 1629 - DNA, 1227 bp, Triticum aestivum; identical to SEQ ID NO: 1627
  source 1..1227: mol_type = genomic DNA

SEQ ID NO: 1630 - DNA, 1398 bp, Triticum aestivum
  source 1..1398: mol_type = genomic DNA
atgacagccaagggccaaaaacctgatatcatctcgtattgtactttgcttcatgggcatgccagagaaggatgctttactgatatgattgatctctttaattcaatgaaaagcaatggtattgcagccgactgccatgttttcaccatattaattgatacctatgctaaacgcggaatgatggatgatgcaatgcacatatttacggaaatgcagcaacaaggtgtgagtccaaatgttgtcacatattcaactgtaatatcagcactttctagaatgggtaggttgaccgatgctatggaaaaatttaatcagatggttgccttgggagtacagccggatagagctatttatcagtccctaattcagggcttttgtatgcatggtggtttggttaaagctaaggagttggtttctcaaatgataaacaaaggtattcctcatcctaacattgtgttcttcaattcagtaataaacagtatgtgcaaggaaggcagggttatggatgcacatgatatctttgacttggttatagacataggtgataggcctgatgacacttcatttaattcactgattgatggatattgcttagtcgggaagatggataaagcattcggaatgcttaatgccatggaatcagttggtgttgagcctgatattgttacttacagtacacttgttaatggctattgtagaaatggaaggatcgatgatggtttgactctgtttagagaaatgatgtgcaagggagttaaacctacaactgtgacatatggcatcatactggatgggttgtttcattctgggagaactgttgctgcaatgaaaatgttccatcagatgattgaaagtggaacaacagtgaccatttccacgtacagtataatacttggaggtctttgtagaaataattgtgcagacgaagcgattgtcctgttccagaaattaggagcaatgattgtaaagttcagtattacaatactcaataccatgattaatgcaatgtacaaggttcaaagaaaagaagaagctaaggagttgttcggtacaatatcagccagtgggttggtgcctaatgaatgtacttatggagtaatgataaaaaatcttctggaagaaggatcagtggaagaagctgacaatatgttttcgtttatggacaggagtggtatagtccccagctcccgtcttatgaatgatatcatcagaatgttgttggaaaaaggtgagattgccaaggccggatattatctgtctaaagttgatggaaagagcatatcacttgaagcttcaactacttcattgatgttttctctcttttcaaggaaaagcaaatatcaggaggatatgaaattgctccctgcaaagtatcaaattttcgacggattagttgtc

SEQ ID NO: 1631 - DNA, 2619 bp, Triticum aestivum
  source 1..2619: mol_type = genomic DNA
atgtcccgccgcatccgccttcgccgcgcgctcctactccggctgaagtccggcctgcgccactcctttacctcgccgttttcccgcctccgcatccgcctccgccgctattccaccgcgccgatgtctcgcctccgtctccgcctcccccgcggcagctcctcccccaccacactgataccccgcctccggctcctccgccgctgctccacctccacctccatgtcgtcgccctcacgctcctggtctccccgagacgcctttgccgcggccacggagcgtgttcgcgccgggacgctcagcctggaagacgctcacaaactgttcgacgaattgctcggtcaggccaccccggtcccggagcgctccctgaacggcttccttgccgccctcgcccgcgcgcccgcctccggtgcctgcatcagagatggccccgcccttgcagtggctctcttcaaccgtgtgtgcagagaggaagccggcgcgcaggtggcggcgctcacagtttgcacctacaacatcctcatggactgctgctgccgtgcgcgtcgtccggacctagggcttgccttatttggctgcttcctcaggaagggcctgaagacagaccagaccggcgccaacaccttcctcaagtgcctctgctacgcgaaacggacggatgaggctgtgaacgtgctcctccacaggatgtccgagctcggctgtgtgcctaatgccgtttcgtacaacactgttctgaagggcttatgcgacaatagcatgagtcagcgggcgctcgacctgctccagatggtggcgggaaaaggaggtggctgcttccctgatgtggtggcgtatagcacggtcatccatggcttttttaaggagggtgaaacagggaaggcatgcagtctattccatgaaatgatgcagcaagggattgtgcccagtgtggtgacatataactcgattattgatgcgttgtgcaaggtcagagaagtggacaaggcagagctagtccttcgtcagatggttgctaaaggtgctcaacccgatacagtgacatataattgcatgatcaatggatatgccacatctgggcggttgaaagaggctgctaaaatgttcagagaaatgaaaagccggggtcttacaccaaatgttgttacttgcaactcgttcctggcctccctttgcaagcaccgaagtagcaaagaagctgcagaattttttgattccatgacagccaagggccaaaaacctgatatcatctcgtattgtactttgcttcatgggcatgccagagaaggatgctttactgatatgattgatctctttaattcaatgaaaagcaatggtattgcagccgactgccatgttttcaccatattaattgatacctatgctaaacgcggaatgatggatgatgcaatgcacatatttacggaaatgcagcaacaaggtgtgagtccaaatgttgtcacatattcaactgtaatatcagcactttctagaatgggtaggttgaccgatgctatggaaaaatttaatcagatggttgccttgggagtacagccggatagagctacttatcagtccctaattcagggcttttgtatgcatggtggtttggttaaagctaaggagttggtttctcaaatgataaacaaaggtattcctcatcctaacattgtgttcttcaattcagtaataaacagtatgtgcaaggaaggcagggttatggatgcacatgatatctttgacttggttatagacataggtgataggcctgatgacacttcatttaattcactgattgatggatattgcttagtcgggaagatggataaagcattcggaatgcttaatgccatggaatcagttggtgttgagcctgatattgttacttacagtacacttgttaatggctattgtagaaatggaaggatcgatgatggtttgactctgtttagagaaatgatgtgcaagggagttaaacctacaactgtgacatatggcatcatactggatgggttgtttcattctgggagaactgttgctgcaatgaaaatgttccatcagatgattgaaagtggaacaacagtgaccatttccacgtacagtataatacttggaggtctttgtagaaataattgtgcagacgaagcgattgtcctgttccagaaattaggagcaatgaatgtaaagttcagtattacaatactcaataccatgattaatgcaatgtacaaggttcaaagaaaagaagaagctaaggagttgttcggtacaatatcagccagtgggttggtgcctaatgaatgtacttatggagtaatgataaaaaatcttctggaagaaggatcagtggaagaagctgacaatatgttttcgtttatggacaggagtggtatagtccccagctcccgtctcatgaatgatatcatcagaatgttgttggaaaaaggtgagattgccaaggccggatattatctgtctaaagttgatggaaagagcatatcacttgaagcttcaactacttcattgatgttttctctcttttcaaggaaaagcaaatatcaggaggatatgaaattgctccctgcaaagtatcaaattttcgacggattagttgtc

SEQ ID NO: 1632 - DNA, 2619 bp, Triticum aestivum
  source 1..2619: mol_type = genomic DNA
atgtcccgccgcatccgccttcgccgcgcgctcctactccggctgaagtccggcctgcgccactcctttacctcgccgttttcccgcctccgcatccgcctccgccgctattccaccgcgccgatgtctcgcctccgtctccgcctcccccgcggcagctcctcccccaccacactgataccccgcctccggctcctccgccgctgctccacctccacctccacgtcgtcgccctcacgctcctggtctccccgagacgcctttgccgcggccacggagcgtgttcgcgccgggacgctcagcctggaagacgctcacaaactgttcgacgaattgctcggtcaggccaccccggtcccggagcgctccctgaacggcttccttgccgccctcgcccgcgcgcccgcctccggtgcctgcatcagagatggccccgcccttgcagtggctctcttcaaccgtgtgtgcagagaggaagccggcgcgcaggtggcggcgctcacagtttgcacctacaacatcctcatggactgctgctgccgtgcgcgtcgtccggacctagggcttgccttatttggctgcttcctcaggaagggcctgaagacagaccagaccggcgccaacaccttcctcaagtgcctctgctacgcgaaacggacggatgaggctgtgaacgtgctcctccacaggatgtccgagctcggctgtgtgcctaatgccgtttcgtacaacactgttctgaagggcttatgcgacaatagcatgagtcagcgggcgctcaacctgctccagatggtggcgggaaaaggaggtggctgcttccctgatgtggtggcgtatagcacggtcatccatggcttttttaaggagggtgaaacagggaaggcatgcagtctattccatgaaatgatgcagcaagggattgtgcccagtgtggtgacatataactcgattattgatgcgttgtgcaaggtcagagaagtggacaaggcagagctagtccttcgtcagatggttgctaaaggtgctcaacccgatacagtgacatataattgcatgatcaatggatatgccacatctgggcggttgaaagaggctgctaaaatgttcagagaaatgaaaagccggggtcttacaccaaatgttgttacttgcaactcgttcctggcctccctttgcaagcaccgaagtagcaaagaagctgcagaattttttgattccatgacagccaagggccaaaaacctgatatcatctcgtattgtactttgcttcatgggcatgccagagaaggatgctttactgatatgattgatctctttaattcaatgaaaagcaatggtattgcagccgactgccatgttttcaccatattaattgatacctatgctaaacgcggaatgatggatgatgcaatgcacatatttacggaaatgcagcaacaaggtgtgagtccaaatgttgtcacatattcaactgtaatatcagcactttctagaatgggtaggttgaccgatgctatggaaaaatttaatcagatggttgccttgggagtacagccggatagagctatttatcagtccctaattcagggcttttgtatgcatggtggtttggttaaagctaaggagttggtttctcaaatgataaacaaaggtattcctcatcctaacattgtgttcttcaattcagtaataaacagtatgtgcaaggaaggcagggttatggatgcacatgatatctttgacttggttatagacataggtgataggcctgatgacacttcatttaattcactgattgatggatattgcttagtcgggaagatggataaagcattcggaatgcttaatgccatggaatcagttggtgttgagcctgatattgttacttacagtacacttgttaatggctattgtagaaatggaaggatcgatgatggtttgactctgtttagagaaatgatgtgcaagggagttaaacctacaactgtgacatatggcatcatactggatgggttgtttcattctgggagaactgttgctgcaatgaaaatgttccatcagatgattgaaagtggaacaacagtgaccatttccacgtacagtataatacttggaggtctttgtagaaataattgtgcagacgaagcgattgtcctgttccagaaattaggagcaatgaatgtaaagttcagtattacaatactcaataccatgattaatgcaatgtacaaggttcaaagaaaagaagaagctaaggagttgttcggtacaatatcagccagtgggttggtgcctaatgaatgtacttatggagtaatgataaaaaatcttctggaagaaggatcagtggaagaagctgacaatatgttttcgtttatggacaggagtggtatagtccccagctcccgtctcatgaatgatatcatcagaatgttgttggaaaaaggtgagattgccaaggccggatattatctgtctaaagttgatggaaagagcatatcacttgaagcttcaactacttcattgatgttttctctcttttcaaggaaaagcaaatatcaggaggatatgaaattgctccctgcaaagtatcaaattttcgacggattagttgtc

SEQ ID NO: 1633 - DNA, 2619 bp, Triticum aestivum; identical to SEQ ID NO: 1632
  source 1..2619: mol_type = genomic DNA

SEQ ID NO: 1634 - DNA, 2496 bp, Triticum aestivum
  source 1..2496: mol_type = genomic DNA
atgtctcgcctccgtctccgcctcccccgcggcagctcctcccccaccacactgataccccgcctccggctcctccgccgctgctccacctccacctccacgtcgtcgccctcacgctcctggtctccccgagacgcctttgccgcggccacggagcgtgttcgcgccgggacgctcagcctggaagacgctcacaaactgttcgacgaattgctcggtcaggccaccccggtcccggagcgctccctgaacggcttccttgccgccctcgcccgcgcgcccgcctccggtgcctgcatcagagatggccccgcccttgcagtggctctcttcaaccgtgtgtgcagagaggaagccggcgcgcaggtggcggcgctcacagtttgcacctacaacatcctcatggactgctgctgccgtgcgcgtcgtccggacctagggcttgccttatttggctgcttcctcaggaagggcctgaagacagaccagaccggcgccaacaccttcctcaagtgcctctgctacgcgaaacggacggatgaggctgtgaacgtgctcctccacaggatgtccgagctcggctgtgtgcctaatgccgtttcgtacaacactgttctgaagggcttatgcgacaatagcatgagtcagcgggcgctcgacctgctccagatggtggcgggaaaaggaggtggctgcttccctgatgtggtggcgtatagcacggtcatccatggcttttttaaggagggtgaaacagggaaggcatgcagtctattccatgaaatgatgcagcaagggattgtgcccagtgtggtgacatataactcgattattgatgcgttgtgcaaggtcagagaagtggacaaggcagagctagtccttcgtcagatggttgctaaaggtgctcaacccgatacagtgacatataattgcatgatcaatggatatgccacatctgggcggttgaaagaggctgctaaaatgttcagagaaatgaaaagccggggtcttacaccaaatgttgttacttgcaactcgttcctggcctccctttgcaagcaccgaagtagcaaagaagctgcagaattttttgattccatgacagccaagggccaaaaacctgatatcatctcgtattgtactttgcttcatgggcatgccagagaaggatgctttactgatatgattgatctctttaattcaatgaaaagcaatggtattgcagccgactgccatgttttcaccatattaatcgatacctatgctaaacgcggaatgatggatgatgcaatgcacatatttacggaaatgcagcaacaaggtgtgagtccaaatgttgtcacatattcaactgtaatatcagcactttctagaatgggtaggttgaccgatgctatggaaaaatttaatcagatggttgccttgggagtacagccggatagagctatttatcagtccctaattcagggcttttgtatgcatggtggtttggttaaagctaaggagttggtttctcaaatgataaacaaaggtattcctcatcctaacattgtgttcttcaattcagtaataaacagtatgtgcaaggaaggcagggttatggatgcacatgatatctttgacttggttatagacataggtgataggcctgatgacacttcatttaattcactgattgatggatattgcttagtcgggaagatggataaagcattcggaatgcttaatgccatggaatcagttggtgttgagcttgatattgttacttacagtacacttgttaatggctattgtagaaatggaaggatcgatgatggtttgactctgtttagagaaatgatgtgcaagggagttaaacctacaactgtgacatatggcatcatactggatgggttgtttcattctgggagaactgttgctgcaatgaaaatgttccatcagatgattgaaagtggaacaacagtgaccatttccacgtacagtataatacttggaggtctttgtagaaataattgtgcagacgaagcgattgtcctgttccagaaattaggagcaatgattgtaaagttcagtattacaatactcaataccatgattaatgcaatgtacaaggttcaaagaaaagaagaagctaaggagttgttcggtacaatatcagccagtgggttggtgcctaatgaatgtacttatggagtaatgataaaaaatcttctggaagaaggatcagtggaagaagctgacaatatgttttcgtttatggacaggagtggtatagtccccagctcccgtctcatgaatgatatcatcagaatgttgttggaaaaaggtgagattgccaaggccggatattatctgtctaaagttgatggaaagagcatatcacttgaagcttcaactacttcattgatgttttctctcttttcaaggaaaagcaaatatcaggaggatatgaaattgctccctgcaaagtatcaaattttcgacggattagttgtc

SEQ ID NO: 1635 - DNA, 2619 bp, Triticum aestivum; identical to SEQ ID NO: 1632
  source 1..2619: mol_type = genomic DNA

SEQ ID NO: 1636 - DNA, 2085 bp, Triticum aestivum
  source 1..2085: mol_type = genomic DNA
atggactgctgctgccgcgcgtctcgcccggacctagggcttgccttctttggtcgcctcctcaggacgggcctcaagacaaatgagatcgtcgctagcaccttcctcaagtgcctctgctacgccaatcgtaaggaagaggctgtcaacgtgctgcttcataggatgcccgagcttggctgtgtgcctgatgccttctcatactccattgttctgaagagcttatgtgacaacaacacgagtcagcgggggctgctccagatgatggcgaaagaaggaggtggctgctctcccaacgtggtggcatatagcacggtcatccatggcttcttcaaggaaggtgaaacgggcaaggcatgcagtctgttccaccaaatgatgcagcaaggtgttgtgcccaatgtggtgacgtataactcgattattgatgcgttgtgtaaggctagagcaatggacaaggcagagctagtccttcggcagatggttgccaatggtgctcaacccaatgaagtgacatatacttgcatgatccatgggtattccacatctgggaggttgaaagaggctgctaaaatgttcagagaaatgaaaagccggggtcttacaccaaatactgttacctgcggctcgttaatgacttccctttgcaagcatggaagaagcaaagaagctagagaaatatttgattccatgactgccaaaggccacaaacctgatattgtctcgtaccgtattttgcttcatggttatgccagtgaaggatgctttgctgatatgattgatctatgtaattcaatggaaagcaacggtattgcagccgactgccgtgtttttaccatattaattgatgcctatgctaaacgtggaatgatggatgatgcaatgcacatatttacggaaatgcagcaacgaggtgtgagtccaaatgttgtcacatattcaactgtaatatcagcactttctagaatgggtaggctgaccgatgctatggaaaaatttaatcagatggttgccttgggagtacagccgaacatacctgtttattggtccctaattcagggcttttgtatgcatggtggtttggttaaagttaaggagttggtttctcaaatgataaacaaaggtattcctcgtcctaacattgtgttcttcaattcggtaataaacggtatgtgcaaggaaggaagggttatggatgcacatgatatctttgacttggttatagacctaggtgggaggcctgatgttattacatttaattcactgattgatggatattgcttggcccgcaagctggataaagcattcggaatgtttaattccatggaatcagttggtgttgagcctgatattgttacgtacagtacacttcttgatggctattttaaaaatagaaggatcaatgatggtttggctctgtttagagaaatgccgcgtaagagaattaaacctgacattgttacatatggcatcatgttggatgggttgtttcgtgctgggagaactgttgctgcaaggacaatgttccatgagatgatcgaaagtggaataacagtggacatccccacatataatatagttcttaggggactttgtagaaataactgcacagatgaagcaatcgccctgttccagaaattaggtgcaatgagtatgaagttcaatattgcaatactcaataccatgatcaatgcaatgtacaaggttcggagaagagaagaagctaacaatttgtttgctgcaatatcaaccagtgggttggtgcccaatcaatctacttatgcagtaatgataataaatcttctaaaagatggagcagtggaacatgctagcaatatgttttcatcaatggaaaaaagtggtatagtccccagctcccgtcttataaatggtatcatcagattgttgttggagaatggtgagattgccaaggctggaatttatttgtctaaagttgatgggaatagcatctcactcgaagcttcaactacttcattgatgttgtctctattttcaaggaaagggaaatatcatgaggacatgaaattgctcccagcaaagtatcaattttttgatggatgtagt

SEQ ID NO: 1637 - DNA, 2085 bp, Triticum aestivum; identical to SEQ ID NO: 1636
  source 1..2085: mol_type = genomic DNA

SEQ ID NO: 1638 - DNA, 2085 bp, Triticum aestivum
  source 1..2085: mol_type = genomic DNA
atggactgctgctgccgcgcgtctcgcccggacctagggcttgccttctttggtcgcctcctcaggacgggcctcaagacaaatgagatcgtcgctagcaccttcctcaagtgcctctgctacgccaatcgtaaggaagaggctgtcaacgtgctgcttcataggatgcccgagcttggctgtgtgcctgatgccttctcatactccattgttctgaagagcttatgtgacaacaacacgagtcagcgggggctgctccagatgatggcgaaagaaggaggtggctgctctcccaacgtggtggcatatagcacggtcatccatggcttcttcaaggaaggtgaaacgggcaaggcatgcagtctgttccaccaaatgatgcagcaaggtgttgtgcccaatgtggtgacgtataactcgattattgatgcgttgtgtaaggctagagcaatggacaaggcagagctagtccttgggcagatggttgccaatggtgctcaacccaatgaagtgacatatacttgcatgatccatgggtattccacatctgggaggttgaaagaggctgctaaaatgttcagagaaatgaaaagccggggtcttacaccaaatactgttacctgcggctcgttaatgacttccctttgcaagcatggaagaagcaaagaagctagagaaatatttgattccatgactgccaaaggccacaaacctgatattgtctcgtaccgtattttgcttcatggttatgccagtgaaggatgctttgctgatatgattgatctatgtaattcaatggaaagcaacggtattgcagccgactgccgtgtttttaccatattaattgatgcctatgctaaacgtggaatgatggatgatgcaatgcacatatttacggaaatgcagcaacgaggtgtgagtccaaatgttgtcacatattcaactgtaatatcagcactttctagaatgggtaggctgaccgatgctatggaaaaatttaatcagatggttgccttgggagtacagccgaacatacctgtttattggtccctaattcagggcttttgtatgcatggtggtttggttaaagctaaggagttggtttctcaaatgataaacaaaggtattcctcgtcctaacattgtgttcttcaattcggtaataaacggtatgtgcaaggaaggaagggttatggatgcacatgatatctttgacttggttatagacctaggtgggaggcctgatgttattacatttaattcactgattgatggatattgcttggcccgcaagctggataaagcattcggaatgtttaattccatggaatcagttggtgttgagcctgatattgttacgtacagtacacttcttgatggctattttaaaaatagaaggatcaatgatggtttggctctgtttagagaaatgccgcgtaagagaattaaacctgacattgttacatatggcatcatgttggatgggttgttttgtgctgggagaactgttgctgcaaggacaatgttccatgagatgatcgaaagtggaataacagtggacatccccacatataatatagttcttaggggactttgtagaaataactgcacagatgaagcaatcgccctgttccagaaattaggtgcaatgagtatgaagttcaatattgcaatactcaataccatgatcaatgcaatgtacaaggttcggagaagagaagaagctaacaatttgtttgctgcaatatcaaccagtgggttggtgcccaatcaatctacttatgcagtaatgataataaatcttctaaaagatggagcagtggaacatgctagcaatatgttttcatcaatggaaaaaagtggtatagtccccagctcccgtcttataaatggtatcatcagattgttgttggagaatggtgagattgccaaggctggaatttatttgtctaaagttgatgggaatagcatctcactcgaagcttcaactacttcattgatgttgtctctattttcaaggaaagggaaatatcatgaggacatgaaattgctcccagcaaagtatcaattttttgatggatgtagt

SEQ ID NO: 1639 - DNA, 2085 bp, Triticum aestivum; identical to SEQ ID NO: 1636
  source 1..2085: mol_type = genomic DNA

SEQ ID NO: 1640 - DNA, 2085 bp, Triticum aestivum
  source 1..2085: mol_type = genomic DNA
atggactgctgctgccgcgcgtctcgcccggacctagggcttgccttctttggtcgcctcctcaggacgggcctcaagacaaatgagatcgtcgctagcaccttcctcaagtgcctctgctacgccaatcgtaaggaagaggctgtcaacgtgctgcttcataggatgcccgagcttggctgtgtgcctgatgccttctcatactccattgttctgaagagcttatgtgacaacaacacgagtcagcgggggctgctccagatgatggcgaaagaaggaggtggctgctctcccaacgtggtggcatatagcacggtcatccatggcttcttcaaggaaggagaaacgggcaaggcatgcagtctgttccaccaaatgatgcagcaaggtgttgtgcccaatgtggtgacgtataactcgattattgatgcgttgtgtaaggctagagcaatggacaaggcagagctagtccttcggcagatggttgccaatggtgctcaacccaatgaagtgacatatacttgcatgatccatgggtattccacatctgggaggttgaaagaggctgctaaaatgttcagagaaatgaaaagccggggtcttacaccaaatactgttacctgcggctcgttaatgacttccctttgcaagcatggaagaagcaaagaagctagagaaatatttgattccatgactgccaaaggccacaaacctgatattgtctcgtaccgtattttgcttcatggttatgccagtgaaggatgctttgctgatatgattgatctatgtaattcaatggaaagcaacggtattgcagccgactgccgtgtttttaccatattaattgatgcctatgctaaacgtggaatgatggatgatgcaatgcacatatttacggaaatgcagcaacgaggtgtgagtccaaatgttgtcacatattcaactgtaatatcagcactttctagaatgggtaggctgaccgatgctatggaaaaatttaatcagatggttgccttgggagtacagccgaacatacctgtttattggtccctaattcagggcttttgtatgcatggtggtttggttaaagctaaggagttggtttctcaaatgataaacaaaggtattcctcgtcctaacattgtgttcttcaattcggtaataaacggtatgtgcaaggaaggaagggttatggatgcacatgatatctttgacttggttatagacctaggtgggaggcctgatgttattacatttaattcactgattgatggatattgcttggcccgcaagctggataaagcattcggaatgtttaattccatggaatcagttggtgttgagcctgatattgttacgtacagtacacttcttgatggctattttaaaaatagaaggatcaatgatggtttggctctgtttagagaaatgccgcgtaagagaattaaacctgacattgttacatatggcatcatgttggatgggttgtttcgtgctgggagaactgttgctgcaaggacaatgttccatgagatgatcgaaagtggaataacagtggacatccccacatataatatagttcttaggggactttgtagaaataactgcacagatgaagcaatcgccctgttccagaaattaggtgcaatgagtatgaagttcaatattgcaatactcaataccatgatcaatgcaatgtacaaggttcggagaagagaagaagctaacaatttgtttgctgcaatatcaaccagtgggttggtgcccaatcaatctacttatgcagtaatgataataaatcttctaaaagatggagcagtggaacatgctagcaatatgttttcatcaatggaaaaaagtggtatagtccccagctcccgtcttataaatggtatcatcagattgttgttggagaatggtgagattgccaaggctggaatttatttgtctaaagttgatgggaatagcatctcactcgaagcttcaactacttcattgatgttgtctctattttcaaggaaagggaaatatcatgaggacatgaaattgctcccagcaaagtatcaattttttgatggatgtagt

SEQ ID NO: 1641 - DNA, 2085 bp, Triticum aestivum; identical to SEQ ID NO: 1636
  source 1..2085: mol_type = genomic DNA

SEQ ID NO: 1642 - DNA, 2085 bp, Triticum aestivum
  source 1..2085: mol_type = genomic DNA
atggactgctgctgccgcgcgcgtcgcccagacctagggcttgccttattcggctgcatcctcaggacgggcttgaagatagaccaaatcaccgccaacaccctcctcaagtgcctctgctatgcaaaacagacagaagaggctgtgtacgtgctgcttcataggatgtcggagctcagctgtgtgcctgatgccttcgcatacaacatagttcttaagagcttatgtaaaggtagcaggagccagcgggcgcacgacctgctccggacgatggcaaaagatagaggtggctgcttccctgatgtggtgacatataccacggtcatccatggctttttcaaggagggcgaaacaggcaaggcatgcaatctattccatgaaatgatccatcaaggggttgagcccgatgtggcgacgtacaactcggttattgatgcgttgtgcaaggccagagcaatggacaaggctgaagtagtccttcagcagatggtcgataaaggtgttcaacctgatacagtgacatatacttgcatgatcaatggatattccacatctgggcggttgaaagaggctgctaaaatgttcagagaaatgaaaagccggggtcttataccagatattgttacttgcaactcgttcctggcctccatttgcaagcatggaacaagcaaagaagctgcagagtttttcgatgccatgactgccaagggccacaaaccgaatatcgtctcataccgtattttgcttcatgggtatgctactgaaggatgctttcctgatatgattgatgtctttaattcaatggaaagcaatggtattgcagccgactgccatgttttcaacatattaattgatgctaaacgtggaatgatggatgaagctatgctgatatcaagtaaaatgcaggaacgcagagtgaatcctgatgtagtcacctattccagcataatagctggactttccagattgggtaggctgactgaggccatggaaaaattcaatcagatgattgccttgggagtacaaccgaacaaagctgtttatcacgcgctgattcagggtttttgcatagatggtgatttggctaaagctaagcagttggtttatgaaatgatggacagaggtattcctcgtcctaacatttcgttctttagttcagtaataaagagtctctgccaagaaggaagggttatggatgcacatgatatctttgacttggttatagacatgggtgagaggcctgatggcattttatttaattcactgattgatggttactgcttagtcgggaagatggataaagcattaaaagtgcttgatgtcatggaatcagttggtgttgagcctgatgtttttacatacagtacacttgttaatggctattgtagaaatggaaggatcgatgatggtttgactctgttcagagagatgccgcgtaagagaattaaacctgacactgtttcatatcgcgtaataatggttgggttgtttcgtgctgggagaactgttgccgcaaggaaaatgttccatgagatgatcgagagtggaacaatggtggacattttcacatacaatataatactaggaggcctttgtagaaataattgtgcagacgaagcgatcgcactgttccagaaactacgagcaatgaatgtgaagtttgatattaccacactcaataccatgattaatgcaatgtacaacgttcaaagaaaagaagaagctaaggatttgtttgctacaatatcagccagtgggttggtgcctaatgaatctacttacagagtaatgataaaaaatcttctggaagaaggatcagtggaaaaagctgacagtatgttttcgttgatggacaagagtggtatagctcccagctctcgtctgttaaatgatattatcagaatgttgttggaaaaaggtgagatcaccaaggccggaaattatttgtctaaagttgatgggaagagcatctcacttgaagcttcaacgacttcattaatgttgtctctcttttcaagagaagggaaatatcgggaggacatgaaattgcttcctgcaaagtatcaatttttcgatggattttgt

SEQ ID NO: 1643 - DNA, 2085 bp, Triticum aestivum
  source 1..2085: mol_type = genomic DNA
atggactgctgctgccgcacgcgtcgcccagacctagggcttgccttattcggctgcatcctcaggacgggcttgaagatagaccaaatcaccgccaacaccctcctcaagtgcctctgctatgcaaaacagacagaagaggctgtgtacgtgctgcttcataggatgtcggagctcagctgtgtgcctgatgccttcgcatacaacatagttcttaagagcttatgtaaaggtagcaggagccagcgggcgcacgacctgctccggacgatggcaaaagatagaggtggctgcttccctgatgtggtgacatataccacggtcatccatggctttttcaaggagggcgaaacaggcaaggcatgcaatctattccatgaaatgatccatcaaggggttgagcccgatgtggcgacgtacaactcggttattgatgcgttgtgcaaggccagagcaatggacaaggctgaagtagtccttcagcagatggtcgataaaggtgttcaacctgatacagtgacatatacttgcatgatcaatggatattccacatctgggcggttgaaagaggctgctaaaatgttcagagaaatgaaaagccggggtcttataccagatattgttacttgcaactcgttcctggcctccatttgcaagcatggaacaagcaaagaagctgcagagtttttcgatgccatgactgccaagggccacaaaccgaatatcgtctcataccgtattttgcttcatgggtatgctactgaaggatgctttcctgatatgattgatgtctttaattcaatggaaagcaatggtattgcagccgactgccatgttttcaacatattaattgatgctaaacgtggaatgatggatgaagctatgctgatatcaagtaaaatgcaggaacgcagagtgaatcctgatgtagtcacctattccagcataatagctggactttccagattgggtaggctgactgaggccatggaaaaattcaatcagatgattgccttgggagtacaaccgaacaaagctgtttatcacgcgctgattcagggtttttgcatagatggtgatttggctaaagctaagcagttggtttatgaaatgatggacagaggtattcctcgtcctaacatttcgttctttagttcagtaataaagagtctctgccaagaaggaagggttatggatgcacatgatatctttgacttggttatagacatgggtgagaggcctgatggcattttatttaattcactgattgatggttactgcttagtcgggaagatggataaagcattaaaagtgcttgatgtcatggaatcagttggtgttgagcctgatgtttttacatacagtacacttgttaatggctattgtagaaatggaaggatcgatgatggtttgactctgttcagagagatgccgcgtaagagaattaaacctgacactgtttcatatcgcgtaataatggttgggttgtttcgtgctgggagaactgttgccgcaaggaaaatgttccatgagatgatcgagagtggaacaatggtggacattttcacatacaatataatactaggaggcctttgtagaaataattgtgcagacgaagcgatcgcactgttccagaaactacgagcaatgaatgtgaagtttgatattaccacactcaataccatgattaatgcaatgtacaacgttcaaagaaaagaagaagctaaggatttgtttgctacaatatcagccagtgggttggtgcctaatgaatctacttacagagtaatgataaaaaatcttctggaagaaggatcagtggaaaaagctgacagtatgttttcgttgatggacaagagtggtatagctcccagctctcgtctgttaaatgatattatcagaatgttgttggaaaaaggtgagatcaccaaggccggaaattatttgtctaaagttgatgggaagagcatctcacttgaagcttcaacgacttcattaatgttgtctctcttttcaagagaagggaaatatcgggaggacatgaaattgcttcctgcaaagtatcaatttttcgatggattttgt

SEQ ID NO: 1644 - DNA, 2085 bp, Triticum aestivum; identical to SEQ ID NO: 1642
  source 1..2085: mol_type = genomic DNA

SEQ ID NO: 1645 - DNA, 1758 bp, Triticum aestivum
  source 1..1758: mol_type = genomic DNA
atggctttttcaaggagggcgaaacaggcatgcaatctattccatgaaatgatccatcaaggggttgagcccgatgtggcgacgtacaactcggttattgatgcgttgtgcaaggccagagcaatggacaaggctgaagtagtccttcagcagatggtcgataaaggtgttcagcctgatacagtgacatatacttgcatgatcaatggatgttccacatctgggcggttgaaagaggctgctaaaatgttcagagaaatgaaaagccggggtcttataccagatattgttacttgcaactcgttcctggcctccatttgcaagcatggaacaagcaaagaagctgcagagtttttcgatgccatgactgccaagggccacgaaccgaatatcgtctcataccgtattttgcttcatgggtatgctactgaaggatgctttcctgatatgattgatgtctttaattcaatggaaagcaatggtattgcagccgactgccatgttttcaacatattaattgatgcatatgctaaacgtggaatgatggatgaagctatgctgatatcaagtaaaatgcaggaacgcagagtgaatcctgatgtagtcacctattccagcataatagctggactttccagattgggtaggctgactgaggccatggaaaaattcaatcagatgattgccttgggagtacaaccgaacaaagctgtttatcacgcgctgattcagggtttttgcatagatggtgatttggctaaagctaagcagttggtttctgaaatgatgaacagaggtattcctcgtcctaacatttcgttctttagttcagtaataaagagtctctgccaagaaggaagggttatggatgcacatgatatctttgacttggttatagacatgggtgagaggcctgatggcattttatttaattcactgattgacggttactgcttagtcgggaagatggataaagcattaaaagtgcttgatgtcatggaatcagttggtgttgagcctgatgtttttacatacagtacacttgttaatggctattgtagaaatggaaggatcgatgatggtttgactctgttcagagagatgccacgtaagagaattaaacctgacactgtttcatatcgcgtaataatggttgggttgtttcgtgctgggagaactgttgccgcaaggaaaatgttccatgagatgatcgagagtggaacaatggtggacattttcacatacaatataatactaggaggcctttgtagaaataattgtgcagacgaagcgatcgcactgttccagaaactacgagcaatgaatgtgaagtttgatattaccacactcaataccatgattaatgcaatgtacaacgttcaaagaaaagaagaagctaaggatttgtttgctacaatatcagccagtgggttggtgcctaatgaatctacttacagagtaatgataaaaaatcttctggaagaaggatcagtggaaaaagctgacagtatgttttcgttgatggacaagagtggtatagctcccagctctcgtctgttaaatgatattatcagaatgttgttggaaaaaggtgagatcgccaaggccggaaattatttgtctaaagttgatgggaagagcatctcacttgaagcttcaacgacttcattaatgttgtctctcttttcaagagaagggaaatatcgggaggacatgaaattgcttcctgcaaagtatcaatttttcgatggattttgt

SEQ ID NO: 1646 - DNA, 2085 bp, Triticum aestivum; identical to SEQ ID NO: 1643
  source 1..2085: mol_type = genomic DNA

SEQ ID NO: 1647 - DNA, 2085 bp, Triticum aestivum; identical to SEQ ID NO: 1642
  source 1..2085: mol_type = genomic DNA

SEQ ID NO: 1648 - DNA, 2085 bp, Triticum aestivum; identical to SEQ ID NO: 1643
  source 1..2085: mol_type = genomic DNA

SEQ ID NO: 1649 - DNA, 2376 bp, Triticum aestivum
  source 1..2376: mol_type = genomic DNA
atggtcttcccacgccgcatttgccgcggccacggagcgcgtccgcgccgggacgctcagaccggaggacgcacaccacctgttcgaccaattgctacaacagaccacccgggtccacgagcgctccctgcatggatattcctcgccgcccttgcccgtgctacgccctccgcagcctgcaaagatggcccctccctcgccctcgccctcttcaaccgcgtatgccgagaagaagcaggccggcgggtggcgccgcccacagtccatacatacggcatcctgatgaactgctgctgccttgtgcgtcgtccagacctagggcttgccttatttggccgcctcctaaggacagggctcaaaacaaatgagatcgtcgccagcaccatcctcaagtgcctctgctgcgcaaaacggacagatgaagcagtaaacgtgttgcttcataggatgtccgacctcggctgtgtgcctaatgtgttctcatacaacagagttctaaagagcttgtgtgaagatggcaggagccagcgggcgctcgacctgctccgggtgatggcaaaaggagatggagatggctgctccccctgcgtggtgtcatacagcacggtcatctatggcttctttaaggaaggcaaagtaggcaaggcatgcaatctatttcatgaaatgacgcagcaaggcattgtgtctgatgtggtgacgtataactcaattatcgatgcactgtgcaaggccagagctatggacaaggctgagctgttccttcggcagatggttgatgatgatattcgaccgaatggagtgacatatactgcaattatccatggatattccactttgggccagtggaaaaaggcgactcaaatgtttagagaaatgacaagccgcggtcttgtaccaaatactgtcacttggaactcattcatggcctccctctgcaagcatggaagaagcaaagaagttgcagaacttctttattccatggctgtgaagggccacaagcctaatgtcgtatcctactctattttgcttcatgggtatgcaaccgaagggtgctttgctgatatggttaatctctttaattcaatggtaggcaaaggtattgtaccggaccaccatgttttcaacatattcattaatgcatatgctaagtgtgggatgatggatgaagctatgcatatgttgactgaaatgcgggaacaaggaatgagtccggatatgtgcacctatgcaaccataatagctgcactttgcagaatgggtaggctggctgatgctgtggacaattttaatcagatgattgggaagggagtacagccaagcaaagttgtttatcgctccttaattcagggattctgtacacacggtgatttggtgaaagcgaaggagttcatttctgaaatgacggacaaatgtatttgtcgtcctaccattgtcttcttcagttcaataatgcatagtctgtgcaacgaaggaagggtcatagatgcgcaccatatctttgacttggttatagacattggtgagagacctgatctcattgcatttaatactctgattgacggatattgcttagtcggcaacatggagaaagcactcggtgtacttgattccatggtatcagctggcattgagcctactgttgttacatatagctcacttattagtgggtattgtaagagtggaaggctcgatgatggtgttattctattcagagaaatggagcataagagagttaaacctgacactgttacatataacatcatactggatgggttatttcatgctgggggaacaattgctgcaaagaagttgttcaatgagatggttgaaagtggaacagtagtgagcatttccacatacaggatagtccttggaggactttgtaggaataattgcaccaatgaagcaatcgtcttgttccagaaattaggtgcaatgaatgtgaagttcgatattgcaatactcaataccatgattaatgcaatgtacaaggttcagagaagagaagaagctaacgatttgtttgcttcattaccagcctgtgggctggtacctaatgcctctacttacggagtagtaatacagaatcttctgaaagaaggaccgttggaagaagctgacaatatgttttcatcaatggagaagagtggttgtgttcccagctctcgtcttataaatgatatcatcagaacgttattggaaaagggggaaatagtcaaggcagcaaattatatgtctaaaattgatgggaagatcatttcttttgaagcttcaaccacttcgttgatgttgtctctcttttcggagaaaggcaaataccaggaacaattacaattgctccctgcgaaataccatttctttggtggagtcatt

SEQ ID NO: 1650 - DNA, 2376 bp, Triticum aestivum; identical to SEQ ID NO: 1649
  source 1..2376: mol_type = genomic DNA

SEQ ID NO: 1651 - DNA, 2376 bp, Triticum aestivum; identical to SEQ ID NO: 1649
  source 1..2376: mol_type = genomic DNA

SEQ ID NO: 1652 - DNA, 2376 bp, Triticum aestivum; identical to SEQ ID NO: 1649
  source 1..2376: mol_type = genomic DNA

SEQ ID NO: 1653 - DNA, 2376 bp, Triticum aestivum; identical to SEQ ID NO: 1649
  source 1..2376: mol_type = genomic DNA

SEQ ID NO: 1654 - DNA, 2376 bp, Triticum aestivum; identical to SEQ ID NO: 1649
  source 1..2376: mol_type = genomic DNA

SEQ ID NO: 1655 - DNA, 2646 bp, Triticum aestivum
  source 1..2646: mol_type = genomic DNA
atgcccagccgcatcccgccgccgatgccccgccgcatatgcgtctggctccgctgctcctccccatcctcatcctgcacctatcccgactccggtctccgccacccgtcctgccttacctctccgttgtccggcctccgcctccgccgctccttcaccactccgatgtcgaacctccgcctccgctgctccttcaccactccgatgtcgaacctccgcctcttccgccgcagctcctcctccacctccacccccacctcgccgtcctcacgttcatggtctccccacgcagcctttgccgcggccacagagcgcgtccgcgccgggacgctgaaccaagacgacacacacaacctgtttgacgaattgctgcggcaggccatcccggtccccgggcgctccctgaacggcttcctcgccgccctcgcacgtgctacctcctctgccgcctgcatcagagatggccctgccctcaccgtcgccctcttcaaccgcgtgtgccgggagcaagccggcccgcgggtggcgcctctcacagtccacacgtacaacatcctcatggactgctgctgccgcgcgtctcgcccggacctaggtcttgccttcttcggccgcctcctcaggacgggcctcaagacaaatgagatcgttgccaccaccttcctcaagtgcctctgctacgcaaaacggacggatgaggctgtgaacgtgctgcttcataggatgcccgagctcggctgtgtgcctgacgccttcgcatactccactgttctgaagagcttatgcgacaatagcatgagtcagcgggggctcgacctgctccatatgatggcgaaagaaggaggtggctgctcccccaacgtggtggcgtatagcaccgtcatccatggcttctttaaggaaggtgaaacaggcaaggcatgcaatctgttccatgaaatgatgcagcaaggtgttgagcccaatgtgtggacatatagttcaatcattgatgcattgtgcaaggccagagcaatggacaaggcagagctagtgcttcagcagatggttaacaaaggtgttcaacccaataatgtgacatataattgcatgatccatggatattccacatctgggtggtggaaagaggttgttaaattgtttagagaaatgaaaagccggggccttataccagatatttttacttgcaactccttaatgacttacctttgtaagcatggaagaagcaaagaagctgcagaattttttgacgccgtgactgccaaaggccacagagatgtcatctcctactgtattttgcttcatgggtatgccaatgaaggatgctttgctgatatgattgatctctttaattcaatgcaaagaaacggtattgctgccaactgccatgttttcaacatattaattaatggatatgctaaacgtggaatgacggaagaagctatgctgatatttacaaaaatgtgggaaaaaggagtgagtccagatgtagtcacctattccatagtaatagccgcactttccagaatggggaggttgaccgacgctatggaaaaatttaatcagatgattgccatgggaattcagccaaacacagccgtttatcactccctaattcagggtttttgcatagacggtgatttggttaaagccaagcagctggtttctgaaatgatgaacagaggtattcctcgtccaaacattgtgttcttcaattcagtaataaacagtctgtgcaaagaaggaagggtcatggatgcacatgatgtcttagacttggttgtaggcataggtgagaggcctaatgtcattacatttagttcactgattgacggatattgctcagtcgggaacatggataaagcattcaaaatacttgatgtcatggaatcagttggtgttgagcctaatgttgttacttatagtgcacttcttgatggctattctaaaaacagaaggattgatgatgctctgactttgtttagagaaatgccgcgtaagagaattaaacctgacactgttacatgtggcatcatgttggatgggttgtttcgtgctgggagaactgtcgctgcaatggaaatgttccatgagatgactgaaagtggaacaacagtggacattttcatatacaatataatacttggaggtctttgtagaaataattgtgtagatgaagcgattgcactgttccagaaattgcgagcaatgaatgtgaagttcaatattgaaatactcaataccatgattaatgcaatgtacaaggttcaaagaaaggaagaagcaaaggaattgtttgctacaatatcagccaatgggttggtgcccaatgaatctacttatgcagtaatgataagaaatcttctgaaagacggagcagtggaagatgctgacaatatgttttcatcaatggacaacagtggtatcgttcccagttcccgtcttataaatgatatcatcagaatgttgttggaaaaaggtgagatagccaaggctggaaattatttgtctaaagttgatgggaagagtatctcacttgaagcttcaactacctcattgatgttgtctctcttttcaaggaaagggaaacaccaggaggatattaagttgctccctgcaaagtatcaaatttttgatggatttagt

SEQ ID NO: 1656 - DNA, 1632 bp, Triticum aestivum
  source 1..1632: mol_type = genomic DNA
atggacaaggcagagctagtgcttcagcagatggttaacaaaggtgttcaaccgaataatgtgacatataattgcatgatccatggatattccacatctgggtggtggaaagaggttgttaaattgtttagagaaatgaaaagccggggccttataccagatatttttacttgcagctccttaatgacttacctttgtaagcatggaagaagcaaagaagctgcagaattttttgacgccgtgactgccaaaggccacagagatgtcatctcctactgtattttgcttcatgggtatgccaatgaaggatgctttgctgatatgattgatctctttaattcaatgcaaagaaacggtattgctgccaactgccatgttttcaacatattaattaatggatatgctaaacgtggaatgacggaagaagctatgctgatatttacagaaatgtgggaaaaaggagtgagtccagatgtagtcacctattccatagtaatagccgcactttccagaatggggaggttgaccgacgctatggaaaaatttaatcagatgattgccatgggaattcagccaaacacagccgtttatcactccctaattcagggtttttgcatagacggtgatttggttaaagccaagcagctggtttctgaaatgatgaacagaggtattcctcgtccaaacattgtgttcttcaattcagtaataaacagtctgtgcaaagaaggaagggttatggatgcacatgatgtcttagacttggttataggcataggtgagaggcctaatgtcattacatttaattcactgattgacggatattgcttagtcgggaacatggataaagcattcaaaatacttgatgtcatggaatcagttggtgttgagcctaatgttgttacttatagtgcacttcttgatggctattctaaaaacagaaggattgatgatgctctgactttgtttagagaaatgccgcgtaagagaattaaacctgacactgttacatatggcatcatgttggatgggttgtttcgtgccgggagaactgtcgctgcaatggaaatgttccatgagatgactgaaagtggaacaacagtggacattctcatatacaatataatacttggaggtctttgtagaaataattgtgtagatgaagcgattgcactgttccagaaattgcgagcaatgaatgtgaagttcaatattgaaatactcaataccatgattaatgcaatgtacaaggttcaaagaaaggaagaagcaaaggaattgtttgctacaatatcagccaatgggttggtgcccaatgaatctacttatgcagtaatgataagaaatcttctaaaaggcggagcagtggaagatgctgacaatatgttttcatcaatggacaacagtggcatcgttcgcagttctggtcttataaatgatatcatcagaatgttgttgaaaaaaggtgagatagccaaggctggcaattatttgtctaaagttgacgggaagagtatctcacttgaagcttcaactacctcattgttgttgtctctcttttcaaggaaagggaaacatcaggtggatattaagttgctccctgcaaagtatcaattttttgatggatttggt

SEQ ID NO: 1657 - DNA, 1632 bp, Triticum aestivum; identical to SEQ ID NO: 1656
  source 1..1632: mol_type = genomic DNA

SEQ ID NO: 1658 - DNA, 1632 bp, Triticum aestivum; identical to SEQ ID NO: 1656
  source 1..1632: mol_type = genomic DNA

SEQ ID NO: 1659 - DNA, 657 bp, Triticum aestivum
  source 1..657: mol_type = genomic DNA
atgccgcgtaagagaattaaacctgacactgttacatatggcatcatgttggatgggttgtttcgtgctgggagaattgtcgctgcaatggaaatgttccatgagatgactgaaagtggaacaacagtggatattctcatatacaatataatacttggaggtctttgtagaaataattgtgtagatgaagcgattgcactgttccagaaattgcgagcaatgaatgtgaagttcaatattgaaatactcaataccatgattaatgcaatgtacaaggttcaaagaaaggaagaagcaaaggaattgtttgctacaatatcagccaatgggttggtgcccaatgaatctacttatgcagtaatgataagaaatcttctgaaagacggagcagtggaagatgctgacaatatattttcatcaatggacaacagtggtatcgttcccagttcccgtcttataaatgatatcatcagaatgttgttggaaaaaggtgagatagccaaggctggaaattatttgtctaaagttgatgggaagagtatctcacttgaagcttcaactacctcattgatgttgtctctcttttcaaggaaagggaaacatcaggaggatattaagttgctccctgcaaagtatcaattttttgatgggtttggt

SEQ ID NO: 1660 - DNA, 2367 bp, Triticum aestivum
  source 1..2367: mol_type = genomic DNA
atggtctccccgcgacgcctttgccgcggccacggagcgcgtccgtgccgggacgctcagcccggaggacgcacaccacctgttcaaccaattgctacggcaggacactccggtccacgagcgctccctgggcggcttccttgccgccctcgcccgtgcgccagactcagctgcctgcagagatggccccgccctcgccatcgccctcttcaaccgcgtatgccgagaagaagcaggccggccggtggtgccgcccacagtctacacctacgccatcctgatgaactgctgctgccgcgtgcgtcgtccggacctagggcttgccttatttggccgcctcctaaggacaggcctcaaacaaatgagatcgtcgccagcaccgtcctcaagtgcctctgctgcgcaaaacggacagatgaagcagtaaacgtgctgattcataggatgtccgacctcggctgtgtgccaaatgagttctcatacaaaacagttctgaagagcctgtgtgaagatagcaggagccagcgagcgctcgatctgctccgggtgatggcaaaaggagatggctgctccccctgcgtggtgtcatacagcactgtcatctatggcttctttaaggaaggaaaagtaggcaaggcatgcaatctatttcatgaaatgacgcagcaaggcgttgtgtctgatgtggtgacatataactcaattatcgatgcactgtgcaaggccagagctatggacaaggctgagctattccttcggcagatggttgatgatgatattcgaccgaatggagtgacatataatgcaatgatccatggatattccactttgggccagtggaaaaaggcgactcaaatgtttagagaaatgacaagccgcggtcttgtaccagatactgtcacttggaactcatgcatggcctccctctgcaagcatggaagaagcagagaagctgcagaacttctttattccatggctgcgaagggccacaagcctaatgtcgtatcctactctactttgcttcatgggtatgcaaacgaagggtgctttgctgatatggttaatctctttaattcaatggtaggcaaaggtattgtaccggaccaccatgttttcaacatattcattaatgcatatgctaagtgtgggatgatggatgaagttatgcatatgttgactgaaatgcgggaacaaggaatgagtccggatgtgtgcacctatgcaaccataatagctgcactttgcagaatgggtaggctggctgatgctgtggacaattttaatcagatgattgggaagggagtacagccaagcaaagttgtttatcgctccttaattcagggattctgtacacacggtgatttggtgaaagcgaaggagttcatttttgaaatgacggacaaatgtatttgtcgtcctaccattgtcttcttcaattcaataatgcatagtctgcgcaacgaaggaagggtcatagatgcgcaccatatctttgacttggttatagacattggtgagagacctgatctcattgcatttaatactctgattgatggatattgcttagtcggcaacatggagaaagcactcggtgtacttgattccatggtatcagctggcattgagcctactgttgttacatatagctcacttattagtgggtattgtaagagtggaaggctcgatgatggtgttattctattcagagaaatggagcataagagagttaaacctgacactgttgcatataacatcatactggatgggttatttcatgctggggcaacaattgctgcaaagaagttgttcaatgagatgattgaaagtggaacagcagtgagcatttccacatacaggatagttcttggaggattttgtaggaataattgcaccgatgaagcgatcgtcttgttccagaaattaggtgcaatgaatgtgaagttcgatattgcaatactcaataccatgattaatgcaatgtacaaggttcagagaagagaagaagctaacgatttgtttgcttcattaccagcctgtgggctcgtacctaatgcctctacttacggagtagtaatacagaatcttctgaaagaaggatcgttggaagaagctgacaatatgttttcatcaatggagaagagtggttgtgctcccagctctcgtcttataaattatatcatcagaacgttgttggaaaagggggagatagtcaatgcagcaaattatatgtctaaagttgatgggaagatcatctcttttgaagcttcgaccacttcgttgttgttgtctctcttttcggagaaaggcaaatatcaggaacaattacaattgctccctgcgaaataccaattctttggtggagtcatt

SEQ ID NO: 1661 - DNA, 2148 bp, Triticum aestivum
  source 1..2148: mol_type = genomic DNA
atgccgagaagaagcaggcaggccggtggtgccgcccacagtctacacctacgccatcctgatgaactgctgctgccgcgtgcgtcgtccggacctagggcttgccttatttggccgcctcctaaggacaggcctcaaacaaatgagatcgtcgccagcaccgtcctcaagtgcctctgctgcgcaaaacggacagatgaagcagtaaacgtgctgattcataggatgtccgacctcggctgtgtgccaaatgagttctcatacaaaacagttctgaagagcctgtgtgaagatagcaggagccagcgagcgctcgatctgctccgggtgatggcaaaaggagatggctgctccccctgcgtggtgtcatacagcactgtcatctatggcttctttaaggaaggaaaagtaggcaaggcatgcaatctatttcatgaaatgacgcagcaaggcgttgtgtctgatgtggtgacatataactcaattatcgatgcactgtgcaaggccagagctatggacaaggctgagctattccttcggcagatggttgatgatgatattcgaccgaatggagtgacatataatgcaatgatccatggatattccactttgggccagtggaaaaaggcgactcaaatgtttagagaaatgacaagccgcggtcttgtaccagatactgtcacttggaactcatgcatggcctccctctgcaagcatggaagaagcagagaagctgcagaacttctttattccatggctgcgaagggccacaagcctaatgtcgtatcctactctactttgcttcatgggtatgcaaacgaagggtgctttgctgatatggttaatctctttaattcaatggtaggcaaaggtattgtaccggaccaccatgttttcaacatattcattaatgcatatgctaagtgtgggatgatggatgaagttatgcatatgttgactgaaatgcgggaacaaggaatgagtccggatgtgtgcacctatgcaaccataatagctgcactttgcagaatgggtaggctggctgatgctgtggacaattttaatcagatgattgggaagggagtacagccaagcaaagttgtttatcgctccttaattcagggattctgtacacacggtgatttggtgaaagcgaaggagttcatttttgaaatgacggacaaatgtatttgtcgtcctaccattgtcttcttcaattcaataatgcatagtctgtgcaacgaaggaagggtcatagatgcgcaccatatctttgacttggttatagacattggtgagagacctgatctcattgcatttaatactctgattgatggatattgcttagtcggcaacatggagaaagcactcggtgtacttgattccatggtatcagctggcattgagcctactgttgttacatatagctcacttattagtgggtattgtaagagtggaaggctcgatgatggtgttattctattcagagaaatggagcataagagagttaaacctgacactgttgcatataacatcatactggatgggttatttcatgctggggcaacaattgctgcaaagaagttgttcaatgagatgattgaaagtggaacagcagtgagcatttccacatacaggatagttcttggaggattttgtaggaataattgcaccgatgaagcgatcgtcttgttccagaaattaggtgcaatgaatgtgaagttcgatattgcaatactcaataccatgattaatgcaatgtacaaggttcagagaagagaagaagctaacgatttgtttgcttcattaccagcctgtgggctcgtacctaatgcctctacttacggagtagtaatacagaatcttctgaaagaaggatcgttggaagaagctgacaatatgttttcatcaatggagaagagtggttgtgctcccagctctcgtcttataaattatatcatcagaacgttgttggaaaagggggagatagtcaatgcagcaaattatatgtctaaagttgatgggaagatcatctcttttgaagcttcgaccacttcgttgttgttgtctctcttttcggagaaaggcaaatatcaggaacaattacaattgctccctgcgaaataccaattctttggtggagtcatt

SEQ ID NO: 1662 - DNA, 2367 bp, Triticum aestivum; identical to SEQ ID NO: 1660
  source 1..2367: mol_type = genomic DNA

SEQ ID NO: 1663 - DNA, 2367 bp, Triticum aestivum
  source 1..2367: mol_type = genomic DNA
atggtctccccgcgacgcctttgccgcggccacggagcgcgtccgtgccgggacgctcagcccggaggacgcacaccacctgttcgaccaattgctacggcaggacactccggtccacgagcgctccctgggcggcttccttgccgccctcgcccgtgcgccagactcagctgcctgcagagatggccccgccctcgccatcgccctcttcaaccgcgtatgccgagaagaagcaggccggccggtggtgccgcccacagtctacacctacgccatcctgatgaactgctgctgccgcgtgcgtcgtccggacctagggcttgccttatttggccgcctcctaaggacaggcctcaaacaaatgagatcgtcgccagcaccgtcctcaagtgcctctgctgcgcaaaacggacagatgaagcagtaaacgtgctgattcataggatgtccgacctcggctgtgtgccaaatgagttctcatacaaaacagttctgaagagcctgtgtgaagatagcaggagccagcgagcgctcgatctgctccgggtgatggcaaaaggagatggctgctccccctgcgtggtgtcatacagcactgtcatctatggcttctttaaggaaggaaaagtaggcaaggcatgcaatctatttcatgaaatgacgcagcaaggcgttgtgtctgatgtggtgacatataactcaattatcgatgcactgtgcaaggccagagctatggacaaggctgagctattccttcggcagatggttgatgatgatattcgaccgaatggagtgacatataatgcaatgatccatggatattccactttgggccagtggaaaaaggcgactcaaatgtttagagaaatgacaagccgcggtcttgtaccagatactgtcacttggaactcatgcatggcctccctctgcaagcatggaagaagcagagaagctgcagaacttctttattccatggctgcgaagggccacaagcctaatgtcgtatcctactctactttgcttcatgggtatgcaaacgaagggtgctttgctgatatggttaatctctttaattcaatggtaggcaaaggtattgtaccggaccaccatgttttcaacatattcattaatgcatatgctaagtgtgggatgatggatgaagttatgcatatgttgactgaaatgcgggaacaaggaatgagtccggatgtgtgcacctatgcaaccataatagctgcactttgcagaatgggtaggctggctgatgctgtggacaattttaatcagatgattgggaagggagtacagccaagcaaagttgtttatcgctccttaattcagggattctgtacacacggtgatttggtgaaagcgaaggagttcatttttgaaatgacggacaaatgtatttgtcgtcctaccattgtcttcttcaattcaataatgcatagtctgcgcaacgaaggaagggtcatagatgcgcaccatatctttgacttggttatagacattggtgagagacctgatctcattgcatttaatactctgattgatggatattgcttagtcggcaacatggagaaagcactcggtgtacttgattccatggtatcagctggcattgagcctactgttgttacatatagctcacttattagtgggtattgtaagagtggaaggctcgatgatggtgttattctattcagagaaatggagcataagagagttaaacctgacactgttgcatataacatcatactggatgggttatttcatgctggggcaacaattgctgcaaagaagttgttcaatgagatgattgaaagtggaacagcagtgagcatttccacatacaggatagttcttggaggattttgtaggaataattgcaccgatgaagcgatcgtcttgttccagaaattaggtgcaatgaatgtgaagttcgatattgcaatactcaataccatgattaatgcaatgtacaaggttcagagaagagaagaagctaacgatttgtttgcttcattaccagcctgtgggctcgtacctaatgcctctacttacggagtagtaatacagaatcttctgaaagaaggatcgttggaagaagctgacaatatgttttcatcaatggagaagagtggttgtgctcccagctctcgtcttataaattatatcatcagaacgttgttggaaaagggggagatagtcaatgcagcaaattatatgtctaaagttgatgggaagatcatctcttttgaagcttcgaccacttcgttgttgttgtctctcttttcggagaaaggcaaatatcaggaacaattacaattgctccctgcgaaataccaattctttggtggagtcatt

SEQ ID NO: 1664 - DNA, 1170 bp, Triticum aestivum
  source 1..1170: mol_type = genomic DNA
atgagtccggatgtgtgcacctatgcaaccataatagctgcactttgcagaatgggtaggctggctgatgctgtggacaattttaatcagatgattaggaagggagtacagccaagcaaagttgtttatcgctccttaattcagggattctgtacacacggtgatttggtgaaagcgaaggagttcatttttgaaatgacggacaaatgtatttgtcgtcctaccattgtcttcttcaattcaataatgcatagtctgtgcaacgaaggaagggtcatagatgcgcaccatatctttgacttggttatagacattggtgagagacctgatctcattgcatttaatactctgattgatggatattgcttagtcggcaacatggagaaagcactcggtgtacttgattccatggtatcagctggcattgagcctactgttgttacatatagctcacttattagtgggtattgtaagagtggaaggctcgatgatggtgttattctattcagagaaatggagcataagagagttaaacctgacactgttgcatataacatcatactggatgggttatttcatgctggggcaacaattgctgcaaagaagttgttcaatgagatgattgaaagtggaacagcagtgagcatttccacatacaggatagttcttggaggattttgtaggaataattgcaccgatgaagcgatcgtcttgttccagaaattaggtgcaatgaatgtgaagttcgatattacaatactcaataccatgattaatgcaatgtgcaaggttcagagaagagaagaagctaacgatttgtttgcttcattaccagcctgtgggctcgtacctaatgcctctacttacggagtagtaatacagaatcttctgaaagaaggatcgttggaagaagctgacaatatgttttcatcaatggagaagagtggttgtgctcccagctctcgtcttataaattatatcatcagaacgttgttggaaaagggggagatagtcaatgcagcaaattatatgtctaaagttgatgggaagatcatctcttttgaagcttcgaccacttcgttgttgttgtctctcttttcggagaaaggcaaatatcaggaacaattacaattgctccctgcgaaataccaattctttggtggagtcatt

SEQ ID NO: 1665 - DNA, 2148 bp, Triticum aestivum; identical to SEQ ID NO: 1661
  source 1..2148: mol_type = genomic DNA

SEQ ID NO: 1666 - DNA, 2367 bp, Triticum aestivum; identical to SEQ ID NO: 1660
  source 1..2367: mol_type = genomic DNA

SEQ ID NO: 1667 - DNA, 2274 bp, Triticum aestivum
  source 1..2274: mol_type = genomic DNA
atgccaaccgcccgcctgtcctccatcttcacctcctccttcaaggctccttcacgagagcgccgagctcccctcgccgccttggctgctgccacggagcgtgtgcgcgccggaacgctaagccaggaggacgcgcaccacctgttcgacgaattgctgagccaagccgccaccgtcccagtacgcgggctcaacaactttcttgctgcgctagctcgtgcaccgcccggactgctgtaccgaggcgctggtgcacgggtggtgtcgcccacgtgctgtacctattccatcctcatggactgctgctgccgtgcaggccgcccggacttggtgcttgccttcttcggccgcctcctcaggttggggctgcgctttgaggaggtcatccccttcaacaacctcctcaaggggctctgccaggccaagcgttcaaatgaggctttggacatgctgctccaccggatgcccgaactggactgtgcgcctgatgtcttctcgttcaacatagtaatcaacggctgctttaaagaaggtgaagtagacaaagcgtgcaatctcttccatgagatgccccaactgggagttcaacctgatgtggtcacctacacctcaatcatggacgcactaagcaagtccggagcaatggacaaggcagaagtgctccttcggcaaatggttgatcaaggaattgaacccaatatcattacgtatactagtctgatccatggatattccacttcgggtcagtggaaagcagcagttaggatattcaaagaaatggcaagtgctggtgttcgaccaaattctgtcacgttgaactcatttattgattccctttgcaagcatagaaagacaaaggaagctagagatatttttgactccatggccgcaaagggccacaaacctgatattttctcctactctactatgcttaattggtatgcgaaagaaggatgcttcgatgatatgactgatctcttcaattcgatggtacggaatggtatcgtacctgaccaccatgttttcaacatactgatcaatgcatatgctagacgtggactgatggataaggctatgcacatgttcgaagtaatgaggcaacaaggagtaaacccaaatgtagttgactatgtagtagtaatggattcactttgcaaaatgggcaagatggctgctgctatggatatatttaatcagatggtcaatcaaggagtttcacctaacaaagctgtttaccaatgcctggttctgggttcttgctctcatggtcattttgtgaaagccaaggaattgatttctgaagcggttaatagaggtctgtgttctaacagtgtgttcttctatcctgtaataaacgaccgttgcaaagaaggaaaggtgaaggaggcacaggatatgtttgacttcattgtaggtattggtcatcggcctcatgtgattatgtacaattcactgatggatggatattgccttgttggcaaggtggaggaagcactgagagtacttgatgctatgaagtctgctggcctccaacctgatctttttacatatggtatacttattaatggctactgtaaaattggaaggatcgacgagggattgagtcttgtcagggaaatttcactcagtggggttaagcccacgactattatgtacaacattatacttgatgggctgttttgctctgggagaacagttcctgcaaaggaaaaattccataagatgaatgaaagtggcataccagtgggcgttggaacatacaacatagttcttagtggactttgtaaaaataattgcactgatgaagcaatagagctgttcaagaaattacgtgctgtgaacgtgaagattaatgtcataacactcactaccatgatttctgcaatgtttaaaactaggagaattgaagaagccaaggatttgtttgctgctatatcagccattgggttggtgccttctgttgtgacttacagtataacgatgacaaatttcataaaagaagggttgcttgcagatgctgatgatatgttttcagcaatggagaaggctggctgtgctcacaactccagactgctaaatcaagtggtcagggtatttctgaagaatggtgaagttgtaaaggctgtgacttatcttgccaaacttgatgcaaaacagctgtcagttgaagcttcgacggtttcgttaatagtatctctcttctcaaggaaagggaaattaagggagcatgtaaaattgcttccggtaaagtaccagcctcctgagatgttggac

SEQ ID NO: 1668 - DNA, 2304 bp, Triticum aestivum
  source 1..2304: mol_type = genomic DNA
atgccaaccgcccgcctgtcctccatctccacctcctccttcagggctccttcacgagcccccctcgccgccttggctgccgccacggaacgcgttcgtgctggaacactaagccgggaggacgcgcaccacctgttcgacgaattgctaggccaagccgcccccgtcccggaacgagggctgaacaactttcttgccgcactagcccgtgctccgccctcatctgcctacagcgatggccccggccttgccatcgccctcttcaaccgcatgtcccgatgcgctggtgcacgggtggtgtcgcccacgctctgtacctattccatcctcatggactgctgctgccgcgcaggctgccgggagctggtggttgccttctttggccgcctcatcaagttggggctgcgcttgaatgtcatccccttcaacaacctcctcaaggggctctgccaggccaagcgtacaaatgaggcggtggacttgctgctccaccggacacctgaactggactgtgtgcctaatgtcttctcgtacagcatcgtaatcaacggctgttttaaacaaggtgaagtagacaaagcgtgcaatctcttccatcagatgatccaactgggagttcaacctaatttggtgacctacaactcaatcatcgacgcactaagcaaatccggagcaatggacaaggcagaagtagtccttcggcaaatggttgatcaaggcattggaccaaacgtcatgacatatactagtctgatccatggatattccacttcaggtcagtggaaggaggcagttaggttattcaagaaaatgataggtcttggtgctctaccagataccgtcatgtggaactcatttatggattcactttgcaagcatagaaggacaaaggatgctagagatatttttgactccatggctgcaaagggccaaaaacctgatattttctcctactctattatgctaaatgggtatgctaaagaaggatacttcgaggatatgactgatctcttcaatttgatggtacggaatggtattgtacctaaccaccatgttttcaacatactgatcaatgcatatgctaaacgtggactgatggatgaggctatgcacatgttcgaagtaatgaggcaacaaggagtaaacccaaatgtagactatctagtaataatggattcactttgtaaaatgggtaggatggatgctgctctggacaaatttaatcagatggtcaatcaaggagtttcacctaacaaagctgtttaccaatgcctggttctgggttcttgctctcatggtcattttgtgaaagccaaggaattgatctctgaagcaattaatagaggtctgttttctaacagtgtgttcttctatcctgtaataaacgacctgtgcaaagaaggaaaggtgaaggaggcacaggatatgtttaacttcattgtaggtattggtcagcggcctgatgtgattatgtacaattcactgatggatggatattgccttgttggcaaggtggaggaagcactgagagtacttgctgctatgaagtctgctggcctccaacctactgctgttacatacggtatacttcttaatggctactgtaaaagtggaaggattgctgctgggttgagtcttttcatggaaatgtcactcagcggggttaagcccactactattatgtacaacattatacttgatgggctgttttgctctgggagaacagtttctgcaaaggaagaattcgatacgatgattgaaagtggcataccagtgaacgttcgcacatacaacatagttcttagtggactttgtagaaacaattgcactggtgaagcaatagagctgttcaagaaattacgtgctatgaacgtgaagattaatgtcataacactcaataccatgatttctgctatgtttaaaactaggagaattgaagaagccaaggatttgtttgctactatatcagccatcggattggtgccttctgttgtgacttacagtgtaatgatgacgaatttcataaaagaagggttgctggcagaggctgatgatatgtttttagcaatggagaaggctggctgtgctcctgactccagactgctaaatcacgtggtcagagtgttgctggagaatggtgcagttgtaaaggctgtgacttatctcactaaacttgatgctaaacagctgtcacttgaagcttcaacggtttcgttcattgtatctctcttctcaaggaaagggaaattaagggagcatgtaaaattgcttccggtaaagtaccagcctcctgagatgttgggc

SEQ ID NO: 1669 - DNA, 2493 bp, Triticum aestivum
  source 1..2493: mol_type = genomic DNA
atgtccagcatccacctccgtcactgctccactatgcccatgtcccgcgtctgcctccgccgccgcctctcctcctcctcctccttctccaactgcacctcgccgccctccccaacctggtctccccacgccgcctttgccgcggccacagagcgcgtgcgagccggtacgctcagcccgcaagacgcacaccacctgttcgacgtattgtttcagcaggccattcgggtccccgagcgctcccttgatggattccttgccgccctcagccatgctacgtcctctgaagcctgcagagacggccccgccctcgccctcaccctcttcaaccgtgtctgccgagaagaagccggcatgcgggtggcgctgcccaccatcttcacctacggcatcctcatgaactgctgctgccgcgtacgtcgtccggacctagggcttgccttctttgggtgcatcctcagggcgggcctgaagacaaaccagatcgccgccaacaccgtcatcaagtgcctctgctgcgcaaaacatactgacgaggctgtcaatatgctgcttcataggatgtccgacctcggctgtgtgcctgatgccttctcatacaacaccattctgaagagcttgtgtgaagacggcaggagcttgcaggcgctcgacctactgctccagatggtgtcgaaggaaggaggtgcctgctctcccgacatggtggcatatagcacggtcatccacggcttcttgaaggaaggcaaagtagacaaggcatgcaatctattcaatgaaatgatgcggcaaggggttgtgcctgatgtggtgacgtatagctcgattatcgatgcattgtgcaaagccggagcaatgcacaaagcagagttgttccttcggcagatggttgataacggtgttcgaccggatgaggtgacatatactagcatgatccatggatattccactttgggccggctgaaagaggtgcgtaaaatgttcagagaaatgacaagctgtggtcttataccagatattgtcacttggaactcgttcatggactccctttgcaagcatggaagaaccaaagaagctgcaaaggttttcttctccatggctgcaaagggcaacaagcctaatattgtctcctacactattcttcttcatgggtatgccaatgaaggaagctttgctgatatgatgagtctcttcaattcaatgaaaggcggcggcattgtagccaactgcaaagttttcaacatattaattggtgcatatgctaaacgagggctgatagatgaagctatgctcatacttactgaaatgcggggacaaggactgagtccggatgtagtcacctattcaactctaatatctgcacattggagaatgggtaagctgactgatgcaatggataacttcagtcagatggttgttggtacgggagtacagccggacacagttttttatcactccctagttcagttcttatgtacacatggtgatttggtgaaagcgaaggagttgatttctgaaatgatgaataaaggtattgctcgtccaaacactgcactcttcagttcaataatggacagtctatgcaatgaaggaagggttatagatgcacaccatatctttgacttggttatagacataggtgagaaacctgatatcagtatgtttagtacgctgattgacggatattgcttagtcggcgagatggacaaagcatgtggagtacttgatgccatggtatcagctggcattgagcctaatgtcattacgtatagcacacttgtcagtagatattgtaaacgtggaaggatcgatgatgggttaattctgttcagacaaatgttgcataagaaagttaaacctacaactgttacatatgaaaccatactgaatggattatttcgtgctgggagaactgctgatgcaaagaaaatgttccatgagatgatcgaaagtggaataatggtgagcatttctgcatataatataattcttggaggactttgtagaaataattgcgcagatgaagcgatcgtcctattccagaaattacgtgcaatgaatgtgaagttcaatatcacaacactcaataccatcattaatgcattgtacaaggttgaaagaagagaagaagctaatgatttgtttgctgcattaccagccagcgggttggtgcctaatgcttccacttatggagttatggtacaaaatcttctaaaagaaggagcagtggaggaagctgacagtatgttttcatcaatggagaagagtggttgtgctcctagctctcgtcttataaatgatgtcatcagaactttattggaaaagggggagatagtcaaggccggaaaatatatgtctaaagttgatgggaagagcatctcacttcaagcttcaactagttcattgttgttgtctctcttttcagggaatgggaaatatcgggaacaactacaattgctccctgcaaagtaccaatttttcaatggaatcagt

SEQ ID NO: 1670 - DNA, 2493 bp, Triticum aestivum; identical to SEQ ID NO: 1669
  source 1..2493: mol_type = genomic DNA

SEQ ID NO: 1671 - DNA, 2493 bp, Triticum aestivum; identical to SEQ ID NO: 1669
  source 1..2493: mol_type = genomic DNA

SEQ ID NO: 1672 - DNA, 1713 bp, Triticum aestivum
  source 1..1713: mol_type = genomic DNA
atgatgcggcaaggggttgtgcctgatgtggtgacgtatagctcgattatcgatgcattgtgcaaagccggagcaatgcacaaagcagagttgttccttcggcagatggttgataacggtgttcggccggatgaggtgacatatactagcatgatccatggatattccactttgggccggctgaaagaggtgcgtaaaatgttcagagaaatgacaagctgtggtcttataccagatgttgtcacttggaactcgttcatggactccctttgcaagcatggaagaaccaaagaagctgcaaaggttttcttttccatggctgcaaagggcaacaagcctaatattgtctcctacactattcttcttcatgggtatgccaatgaaggaagctttgctgatatgatgagtctcttcaattcaatgaaaggcggcggcattgtagccaactgcaaagttttcaacatattaattggtgcatatgctaaacgagggctgatagatgaagctatgctcatacttactgaaatgcggggacaaggactgagtccggatgtagtcacctattcaactctaatatctgcacattggagaatgggtaagctgactgatgcaatggataagttcagtcagatggttgttggtatgggagtacagccggacacagttttttatcactccctagttcagttcttatgtacacatggtgatttggtgaaagcgaaggagttgatttctgaaatgatgaataaaggtattgctcgtccaaacactgcactcttcagttcaataatggacagtctatgcaatgaaggaagggttatagatgcacaccatatctttgacttggttatagacataggtgagaaacctgatatcagtatgtttagtacgctgattgacggatattgcttagtcggcgagatggacaaagcatgtggagtacttgatgccatggtatcagctggcattgagcctaatgtcattacgtatagcacacttgtcagtagatattgtaaacgtggaaggatcgatgatgggttaattctgttcagacaaatgttgcataagaaagttaaacctacaactgttacatatgaaaccatactgaatggattatttcgtgctgggagaactgctgatgcaaagaaaatgttccatgagatgatcgaaagtggaataatggtgagcatttctgcatataatataattcttggaggactttgtagaaataattgcgcagatgaagcgatcgtcctattccagaaattacgtgcaatgtatgtgaagttcaatatcacaacactcaataccatcattaatgcattgtacaaggttgaaagaagagaagaagctaatgatttgtttgctgcattaccagccagtgggttggtgcctaatgcttccacttacggagtaatggtacaaaatcttctaaaagaaggagcagtggaggaagctgacagtatgttttcatcaatggagaagagtggttgtgctcctagctctcgtcttataaatgatgtcatcagaactttattggaaaagggggagatagtcaaggccggaaaatatatgtctaaagttgatgggaagagcatctcacttgaagcttcaactagttcattgttgttgtctctcttttcagggaatgggaaatatcgggaacaactacaattgctccctgcaaagtaccaatttttcaatggaatcagt

SEQ ID NO: 1673 - DNA, 729 bp, Triticum aestivum
  source 1..729: mol_type = genomic DNA
atgtccagcatccacctccgtcactgctccactatgcccatgtcccgcgtctgcctccgccgccgcctctcctcctcctccttctccaactgcacctcgccgccctccccaacctggtctccccacgccgcctttgccgcggccacagagcgcgtgcgagccggtacgctcagcccgcaagacgcacaccacctgttcgacgtattgtttcagcaggccattcgggtccccgagcgctcccttgatggattccttgccgccctcagccatgctacgtcctctgaagcctgcagagacggccccgccctcgccctcaccctcttcaaccgtgtctgccgagaagaagccggcatgcgggtggcgccgcacaccatcttcacctacggcatcctcatgaactgctgctgccgcgtacgtcgtccggacctagggcttgccttctttgggcgcatcctcagggcgggcctgaagacaaaccagatcgccgccaacaccgtcatcaagtgcctctgctgcgcaaaacatactgacgaggctgtcaatatgctgcttcataggatgtccgacctcggctgtgtgcctgatgccttctcatacaacaccgttctgaagagcttgtgtgaagacggcaggagcttgcaggcgctcgacctactgctccagatggttgctcccccgacgtggtggcttataacacggtcatctatggcttctttaaggaaggtgaag

SEQ ID NO: 1674 - DNA, 729 bp, Triticum aestivum; identical to SEQ ID NO: 1673
  source 1..729: mol_type = genomic DNA

SEQ ID NO: 1675 - DNA, 1713 bp, Triticum aestivum; identical to SEQ ID NO: 1672
  source 1..1713: mol_type = genomic DNA

SEQ ID NO: 1676 - DNA, 1713 bp, Triticum aestivum; identical to SEQ ID NO: 1672
  source 1..1713: mol_type = genomic DNA

SEQ ID NO: 1677 - DNA, 729 bp, Triticum aestivum; identical to SEQ ID NO: 1673
  source 1..729: mol_type = genomic DNA

SEQ ID NO: 1678 - DNA, 2274 bp, Triticum aestivum
  source 1..2274: mol_type = genomic DNA
atgccaaccgcccgcctgtcctccatcttcacctcctccttcaaggctccttcacgagagcgccgagctcccctcgccgccttggctgctgccacggagcgtgtgcgcgccggaacgctaagccaggaggacgcgcaccacctgttcgacgaattgctgagccaagccgccaccgtcccagtacgcgggctcaacaactttcttgctgcgctagctcgtgcaccgcccggactgctgtaccgaggcgctggtgcacgggtggtgtcgcccacgtgctgtacctattccatcctcatggactgctgctgccgtgcaggccgcccggacttggtgcttgccttcttcggccgcctcctcaggttggggctgcgctttgaggaggtcatccccttcaacaacctcctcaaggggctctgccaggccaagcgttcaaatgaggctttggacatgctgctccaccggatgcccgaactggactgtgcgcctgatgtcttctcgttcaacatagtaatcaacggctgctttaaagaaggtgaagtagacaaagcgtgcaatctcttccatgagatgccccaactgggagttcaacctgatgtggtgacctacacctcaatcatggacgcactaagcaagtccggagcaatggacaaggcagaagtgctccttcggcaaatggttgatcaaggaattgaacccaatatcaggacatatagctgtctgatccatggatattctacttttggtcagtggaaggaggcacttagggtattcaaagaaatggcaagtcttggtgttgtaccagacgttgtcacattgagctcattaatcgattccctttgcaggcacagaaggacaaagcaagctagagaaatttttgactctatggctgcaaagggcctgaaacctaatatcgtctcctactctactatgcttaatgggtatgtcaaagaaggatccttcgaggatatgaccggtctcttcaattcgatggtacggaatggtattgtacctaaccaccatattttcaacatactgatcaatgcatatgctaaacgtggactgatggatgaggctatgcacatgttcgaagtaatgaggcaacaaggagtaaacccagatgtatttggctatcaaatcataatggattcactttgtaaaatgggtaagatggatgctgctctggacaaatttaatcagatggtcaatcaaggagtttcacctaacaaagctgtttaccaatgcctggttctgggttcttgctctcatggtgattttgtgaaagccaaggaattgatttctgaagcggttaatagaggtctgtgttctaacagtgtgttcttctatcctgtaataaacgaccgttgcaaagaaggaaaggtgaaggacgcacaggatatgtttgacttcattgtaggtattggtcatcggcctgatgtgattatgtacaattcactgatggatggatattgccttgttggcaaggtggaggaagcactgagagtacttgatgctatgaagtctgctggcctccaacctgatgtttttacatatggtatacttattaatggctactgtaaaattggaaggatcgacgacggattgagtcttgtcagggaaatttcactcagtggggttaagcccacgactattatgtacaacattatacttgatgggctgttttgctctgggagaacagttcctgcaaaggaaaaattccataagatgaatgaaagtggcataccagtgggcgttggaacatacaacatagttcttagtggactttgtaaaaataattgcactgatgaagcaatagagctgttcaagaaattacgtgctgtgaacgtgaagattaatgtcataacactcactaccatggtttctgcaatgtttaaaactaggagaattgaagaagccaaggatttgtttgttactatatcagccattgggttggtgccttctgttgtgacttacagtataatgatgacaaatttcataaaagaagggttgcttgcagatgctgatgatatgttttcagcaatggagaaggctggctgtgctcacaactccagactgctaaatcaagtggtcagggtatttctgaagaatggtgaagttgtaaaggctgtgacttatcttgccaaatttgatgcaaaacagctgtcagttgaagcttcgacggtttcgttaatagtatctctcttctcaaggaaagggaaattaagggagcatgtaaaattgcttccggtaaagtaccagcctcctgagatgttggac

SEQ ID NO: 1679 - DNA, 2274 bp, Triticum aestivum; identical to SEQ ID NO: 1678
  source 1..2274: mol_type = genomic DNA

SEQ ID NO: 1680 - DNA, 1122 bp, Triticum aestivum
  source 1..1122: mol_type = genomic DNA
atgggtaagctgactgatgccatggataagttcagtcagatggttgttggtacgggagtacagccggacacagttgtttatcactccctagttcagttcttatgtacacatggtgatttggtgaaagcgaaggagttgatttctgaaatgatgaataaaagtattgctcgtccaaacactgcactctttagttcaataatggacagtctatgcaatgaaggaagggttatagatgcacaccatatctttgacttggttatagacataggtgagaaacctgatatcagtatgtttagtacgctgattgacggatattgcttagtcggcgagatggacaaagcatgtggagtacttgatgccatggtatcagctggcattgagcctaatgtcattacgtatagcacacttgtcagtagatattgtaaacgtggaaggatcgatgatgggttgattctgttcagacaaatgttgcataagaaagttaaacctacaactgttacatatgaaaccacactgaatggattatttcgtgctgggagaactgctgatgcgaagaaaatcttcgatgagatgatcgaaagtggaataatggcgagcatttctacatataatataattcttggaggactttgtagaaataattgcgcagatgaagcggtcgtcctattccagaaattacgtgcaatgaatgtgaagttcaatatcacaacactcaataccatcattaatgcattgtacaaggttgaaagaagagaagaagctaatgatttgtttgctgcattaccagtcagcgggttggtgcctaatgcttccacttacggagtgatggtacaaaatcttctaaaagaaggagcagtggaggaagctgacagtatgttctcatcaatggagaagagtggttgtgctcctagctctcgtcttgtaaatgatgtcatcagaactttattggaaaagggggagatagtcaaggccggaaaatatatgtctaaagttgatgggaagagcatctcacttgaagcttcaactagttcgttgttgttgtctctcttttcagggaatgggaaatatcgggaacaactacaattgctccctgcaaagtaccaatttttcgatggaatcagt

SEQ ID NO: 1681 - DNA, 2484 bp, Triticum aestivum
  source 1..2484: mol_type = genomic DNA
atgtccagcatccacctccgccattgctccactatgcccatgtcccgcgtctgcctccgccgccgcctctcctccttctccaactgcacctcgccgccctcaccaacctggtctccccacgccgcctttgccgcggccacggagcgcgtccgcgccggaacgctcagcccgcaagacgcacaccacctgttcgacgaattgtttcggcaggccactccggttcccgagcgctcccttgatggattccttgccgccctcggccgtgccacgccctctgaggcctgcagagacggcccctccctcgccctcaccctcttcaaccgtgtctgccgagaagaagccggcatgcgggttgcgccgccaaccatcttcacctacggcatcctcatgaactgctgctgccgtatgggtcgtccggacctagggctcgcctactttgggcgcatcctcagggcgggcctgaaggcaaaccagatcgccgccaacaccgtcatcaagtgcctctgctgcgcaaaacataccgacgaggctgtcaatatgctgcttcataggatgtccgacctcggctgtgtacctgatgccttctcatacaacacagttctgaagagcttgtgtgaagacggcaggagcttgcaggcgctcgacctactgctccagatggcgtcgaaggaaggaggtgcctgctcccccgacatggtggcatatagcacggtcatccacggcttcttgaaggaaggcaaagtagacaaggcatgcaatctattcgatgaaatgatgcggcaaggggttgtgcctgatgtggtgacgtatagctcgattatcgatgcattgtgcaaagctggagcaatgtacaaggcagagttgttccttcggcagatggttgatgatggtgttcgaccggatgaggtgacatatactagcatgatccatggatattccactttgggccggtggaaacaggtgcgtaaaatgttcagagaaatgacaagccgtggtcttataccagatactgtcacttggaactcgttcatggactccctctgcaagcatggaagaaccaaagaagctgcagaagttttcttttccatggctggaaagggcagcaagcctaatattgtctcctacactattcttcttcatgggtatgccaatgaaggaagctttgctgatatgatgagtctcttcaattcaatgaaaggcggcggcattgtagccaactgcaaagttttcaacatattaattggtgcatatgctaaacgagggctgatagatgaagctatgctcatacttactgaaatgcggggacaaggactgagtccggatgtagtcacctattcaactctaatatctgcacattggagaatgggtaagctgactgatgccatggataagttcagtcagatggttgttggtacgggagtacagccggacacagttgtttatcactccctagttcagttcttatgtacacatggtgatttggtgaaagcgaaggagttgatttctgaaatgatgaataaaagtattgctcgtccaaacactgcactcttcagttcaataatggacagtctatgcaatgaaggaagggttatagatgcacaccatatctttgacttggttatagacataggtgagaaacctgatatcagtatgtttagtacgctgattgacggatattgcttagtcggcgagatggacaaagcatgtggagtacttgatgccatggtatcagctggcattgagcctaatgtcattacgtatagcacacttgtcagtagatattgtaaacgtggaaggatcgatgatgggttgattctgttcagacaaatgttgcataagaaagttaaacctacaactgttacatatgaaaccatactgaatggattatttcgtgctgggagaactgctgatgcgaagaaaatcttcgatgagatgatcgaaagtggaataatggtgagcatttctacatataatataattcttggaggactttgtagaaataattgcgcagatgaagcggtcgtcctattccagaaattacgtgcaatgaatgtgaagttcaatatcacaacactcaataccatcattaatgcattgtacaaggttgaaagaagagaagaagctaatgatttgtttgctgcattaccagtcagcgggttggtgcctaatgcttccacttacggagtgatggtacaaaatcttctaaaagaaggagcagtggaggaagctgacagtatgttctcatcaatggagaagagtggttgtgctcctagctctcgtcttgtaaatgatgtcatcagaactttattggaaaagggggagatagtcaaggccggaaaatatatgtctaaagttgatgggaagagcatctcacttgaagcttcaactagttcgttgttgttgtctctcttttcagggaatgggaaatatcgggaacaactacaattgctccctgcaaagtaccaatttttcgatggaatcagt

SEQ ID NO: 1682 - DNA, 1122 bp, Triticum aestivum; identical to SEQ ID NO: 1680
  source 1..1122: mol_type = genomic DNA

SEQ ID NO: 1683 - DNA, 2484 bp, Triticum aestivum; identical to SEQ ID NO: 1681
  source 1..2484: mol_type = genomic DNA

SEQ ID NO: 1684 - DNA, 1011 bp, Triticum aestivum
  source 1..1011: mol_type = genomic DNA
atgcgggttgcgccgccaaccatcttcacctacggcatcctcatgaactgctgctgccgtatgggtcgtccggacctagggctcgcctactttgggcgcatcctcagggcgggcctgaaggcaaaccagatcgccgccaacaccgtcatcaagtgcctctgctgcgcaaaacataccgacgaggctgtcaatatgctgcttcataggatgtccgacctcggctgtgtacctgatgccttctcatacaacacagttctgaagagcttgtgtgaagacggcaggagcttgcaggcgctcgacctactgctccagatggcgtcgaaggaaggaggtgcctgctcccccgacatggtggcatatagcacggtcatccacggcttcttgaaggaaggcaaagtagacaaggcatgcaatctattcgatgaaatgatgcggcaaggggttgtgcctgatgtggtgacgtatagctcgattatcgatgcattgtgcaaagctggagcaatgtacaaggcagagttgttccttcggcagatggttgatgatggtgttcgaccggatgaggtgacatatactagcatgatccatggatattccactttgggccggtggaaacaggtgcgtaaaatgttcagagaaatgacaagccgtggtcttataccagatactgtcacttggaactcgttcatggactccctctgcaagcatggaagaaccaaagaagctgcagaagttttcttttccatggctggaaagggcagcaagcctaatattgtctcctacactattcttcttcatgggtatgccaatgaaggaagctttgctgatatgatgagtctcttcaattcaatgaaaggcggcggcattgtagccaactgcaaagttttcaacatattaattggtgcatatgctaaacgagggctgatagatgaagctatgctcatacttactgaaatgcggggacaaggactgagtccggatgtagtcacctattcaactctaatatctgcacat

SEQ ID NO: 1685 - DNA, 1011 bp, Triticum aestivum; identical to SEQ ID NO: 1684
  source 1..1011: mol_type = genomic DNA

SEQ ID NO: 1686 - DNA, 2484 bp, Triticum aestivum; identical to SEQ ID NO: 1681
  source 1..2484: mol_type = genomic DNA

SEQ ID NO: 1687 - DNA, 2484 bp, Triticum aestivum; identical to SEQ ID NO: 1681
  source 1..2484: mol_type = genomic DNA

SEQ ID NO: 1688 - DNA, 2439 bp, Triticum aestivum
  source 1..2439: mol_type = genomic DNA
atgtcccgcctccacctcctccgccgccgctgctccacctccatttccacctcgccgccttcacgctcctggtctccccgcgctgcctttgccgctgccacagagcgcgtccgcgccgggacgctcagcccggaagacgcacaccacctgttcgaccaattgctgcggcagtccaccccagtccccgagcgctccctgaatggattccttgccgccctcgtccgtacgccggcctcagaatcctgcagagacgggccctccctcgccctcgccctcttcaaccgtgtctgccgagaagaagccggcctgcgggtggcgccgcccaccatcttcacctacaacatcctcatgaactgctgttgcctggcgcgtcgcccggacctaggacttgcctttttcggccgcctcctcaggactggcctgaagacaaaccagagcttcgccaacaccctcctcaagtgcctctgctgcgcaaaacagacagacgaggctgtcagcgtgctgcttcataggatgtccgacctcggctgtgtgcctgatgacttctcatacaacacagttctaaagagcttgtgtgaagatagcaggagccggcgagcgctcgacctgctccagatgatggcgaaagaaggaggtgtctgctcccctgatgtggtcacatataacacagtcatccatggcttctttaaggaaggtgaaataggcaaggcctgcaatctattccatgaaatgatgcagcaaggggttgtgcctaatgtggtgacatataactcgattatcgatgcattgtgcaaggcccgagcaatggacaatgcagagttgttccttcgcatgatggttgataacggtgttccaccagataaggtgacatatactagcatgatccatggatattccactttgggccgatggaaagaggcaactaaaaagttcagagaaatgacaagcaggggtcttataccaggtattatcacttggaactcgttcatggactccctctgcaagcatggaagaagcaaagaagttgcagaaatttttcattccatgtctgcaaagggccacaagcctgatatcatctcctacaccactcttcttcatgggtatgccaatgaaggaagctttcctgatatgatgagtctctttaagtcaatggaaggcaacggtattgtagccaactgccaagttttcaacatattaattgatgcatatgctaaacgaggaatgatggacgaagctatgctcatatttaccgaaatgctaggacaaggagtcaatccgagtgtaatcacctactcaattgtgatagctgcactttgcagaatgggtaggctggccgatgctatggatacgttcagtcagatgatttctgttggaatgaaaccggacacagttgtttatcattccctaattcagggtttctctacacatggcgatttggtcaaagcgaaagaactgatatatgaaatgatgaacaacggtattcctcgtccaaacagtgtattcttcagttcaatagtaaacagtctatgcaaagaggggagggttgtggatgcacatcatatcttcgacttggttaaagacttaggtgagagacctaacatcattatgtttactacgctgattgacggatattgcttagtcggtgagatggacaaagcattcagagtacttgatgccatggtattagctggcgttgagcctgatgtcgttacatatagtacacttgtcaatggctattgtagtaatggaaggatcgatgatgggttgattctgttcagagaaatgttgcataagaaagttaaacctacaactgttacatataacatcatactggatcgattatttcgtgccgggagaacagttgctgcaaagaaaatgctccatgagatgatcggaagtggaacacctgtgagcatgcatacatacggcatatttcttagaggactttgtaggaacgattgcaccgatgaagcaattgccctgtttcaaaaattaggtgcactgaatgtgaacttcgatattacaatactcaattccatgattaatgcaatgtacagggttcagagaagagaagaagctaacaagttgtttgctgctatatcaaccagtgggttggtacctaatgcttccacttatggaatcatgatcagaaatcttctaaaagagggatcagtggaagaagctgaagacatgttttcatcaatggaggagagtgactgtgctctcagctctcgtcttataaatgatatcattagaacattattggaaaagggggatatagtcaaggccggaaaatacatgtctaaagttgatgaaacgagcatctcacttgaagcttcaactagttcgttgttgttgtctctcttttccgggaaagggaaatgtcgggaacaaatagaattgctccctgcaaagtaccaaattttcgatggaatcagt

SEQ ID NO: 1689 - DNA, 2439 bp, Triticum aestivum
  source 1..2439: mol_type = genomic DNA
atgtcccgcctccacctcctccgccgccgctgctccacctccatttccacctcgccgccttcacgctcctggtctccccgcgctgcctttgccgctgccacagagcgcgtccgcgccgggacgctcagcccggaagacgcacaccacctgttcgaccaattcctgcggcagtccaccccagtccccgagcgctccctgaatggattccttgccgccctcgtccgtacgccggcctcagaatcctgcagagacgggccctccctcgccctcgccctcttcaaccgtgtctgccgagaagaagccggcctgcgggtggcgccgcccaccatcttcacctacaacatcctcatgaactgctgttgcctggcgcgtcgcccggacctaggacttgcctttttcggccgcctcctcaggactggcctgaagacaaaccagagcttcgccaacaccctcctcaagtgcctctgctgcgcaaaacagacagacgaggctgtcagcgtgctgcttcataggatgtccgacctcggctgtgtgcctgatgacttctcatacaacacagttctaaagagcttgtgtgaagatagcaggagccggcgagcgctcgacctgctccagatgatggcgaaagaaggaggtgtctgctcccctgatgtggtcacatataacacagtcatccatggcttctttaaggaaggtgaaataggcaaggcctgcaatctattccatgaaatgatgcagcaaggggttgtgcctaatgtggtgacatataactcgattatcgatgcattgtgcaaggcccgagcaatggacaatgcagagttgttccttcgcatgatggttgataacggtgttccaccagataaggtgacatatactagcatgatccatggatattccactttgggcggatggaaagaggcaactaaaaagttcagagaaatgacaagcaggggtcttataccaggtattatcacttggaactcgttcatggactccctctgcaagcatggaagaagcaaagaagctgcagaaatttttcattccatgtctgcaaagggccacaagcctgatatcatctcctacaccactcttcttcatgggtatgccaatgaaggaagctttcctgatatgatgagtctctttaagtcaatggaaggcaacggtattgtagccaactgccaagttttcaacatattaattgatgcatatgctaaacgaggaatgatggacgaagctatgctcatatttaccgaaatgctaggacaaggagtcaatccgagtgtaatcacctactcaattgtgatagctgcactttgcagaatgggtaggctggccgatgctatggatacgttcagtcagatgatttctgttggaatgaaaccggacacagttgtttatcattccctaattcagggtttctctacacatggcgatttggtcaaagcgaaagaactgatatatgaaatgatgaacaacggtattcctcgtccaaacagtgtattcttcagttcaatagtaaacagtctatgcaaagaggggagggttgtggatgcacatcatatcttcgacttggttaaagacttaggtgagagacctaacatcattatgtttactacgctgattgacggatattgcttagtcggtgagatggacaaagcattcagagtacttgatgccatggtattagctggcgttgagcctgatgtcgttacatatagtacacttgtcaatggctattgtagtaatggaaggatcgatgatgggttgattctgttcagagaaatgttgcataagaaagttaaacctacaactgttacatataacatcatactggatcgattatttcgtgccgggagaacagttgctgcaaagaaaatgctccatgagatgatcggaagtggaacacctgtgagcatgcatacatacggcatatttcttagaggactttgtaggaatgattgcaccgatgaagcaattgccctgtttcaaaaattaggtgcactgaatgtgaacttcgatattacaatactcaattccatgattaatgcaatgtacagggttcagagaagagaagaagctaacaagttgtttgctgctatatcaaccagtgggttggtacctaatgcttccacttatggaatcatgatcagaaatcttctaaaagagggatcagtggaagaagctgaagacatgttttcatcaatggaggagagtgactgtgctctcagctctcgtcttataaatgatatcattagaacattattggaaaagggggatatagtcaaggccggaaaatacatgtctaaagttgatgaaacgagcatctcacttgaagcttcaactagttcgttgttgttgtctctcttttccgggaaagggaaatgtcgggaacaaatagaattgctccctgcaaagtaccaaattttcgatggaatcagt

SEQ ID NO: 1690 - DNA, 2439 bp, Triticum aestivum; identical to SEQ ID NO: 1688
  source 1..2439: mol_type = genomic DNA

SEQ ID NO: 1691 - DNA, 2439 bp, Triticum aestivum; identical to SEQ ID NO: 1689
  source 1..2439: mol_type = genomic DNA

SEQ ID NO: 1692 - DNA, 2439 bp, Triticum aestivum; identical to SEQ ID NO: 1688
  source 1..2439: mol_type = genomic DNA

SEQ ID NO: 1693 - DNA, 2439 bp, Triticum aestivum; identical to SEQ ID NO: 1689
  source 1..2439: mol_type = genomic DNA

SEQ ID NO: 1694 - DNA, 2109 bp, Triticum aestivum
  source 1..2109: mol_type = genomic DNA
atgccagccgcccgcctgtcctccttcaaggctccttcacgagagcgccgacctcccctcgccgccttggctgccgccacggagcgcgtccgcgccggaacgctaagtcggcaggacgcgcaccacctgttcgacgaattgctgagccaagccgcgacagtcccagtacgcaagctgaacaactttcttgccgccctcgcccgtgcaccgccctcagctgcctgcagcgatggtccggaccttgccatcgccctcttcaaccgcatgtcccgaggcgctggtgcacgggtggtgtcgcccacgctctctacctattccatcctcatggactgctgctgccgtgcacgccgcccagagttggtggttgccttcttcggccgcctcctcaggttggggctgcgcttggatatcatctcctccagcaatctcctcaaggggctctgccaggccaagcgttcaaatgaggctttggacatgctgctccaccggatgcccgaactggactgtgcgcctgatgtcttctcgttcaacatagtaatcaacggctgctttaaagaaggtgaagtagacaaagcgtgcaatctcttccatgagatgccccaactgggagttcaacctgatgtggtgacctacacctcaatcatggacgcactaagcaagtccggagcaatggacaaggcagaagtgctccttcggcaaatggttgatcaaggaattgaacccaatatcaagacatataactgtctgatccatggatattctacttttggtcagtggaaggcggcagttagagtattcaaagaaatggcaagtgttggtgttcaaccaaatgctgtcactttgaactcattaatcgattccctttgcaagcacagaaggacaaaggaagctagagaaattcttgactccatggccgcaaagggcctgaaacctaatatcgtctcctactctactatgcttaatgggtatgtcaaagaaggatgcttcgatgatatgactgatctcttcaattcgatggtacggaatggtatcgtacctaaccaccatattttcaacatactgatcaatgcatatgctaaacgtggagtgatggatgaggctatgcacatgttcgaagtaatgaggcaacaaggagtaaatccagatgtatttagctatcaaattgtaatggattcactttgcaaaatgggcaggatggatgctgctctggacaaatttaatcagatggtcaatcaaggagtttcacctaacaaagctgtttaccaatgcctggttctgggttcttgctctcatggtcattttgtgaaagccaaggaattgatttctgaagtggttaatagaggtctgtgttctaacagtgtgttcttctatcctgtaataaacggcctttgcaaagaaggaaaggtaaaggaggcacaggatatgtttgacttcatcctaggtattggtcagcggcctgatgtgattatgtacacttcactgatggatggatattgccttgttggcgaggtggagaaagcactgagtgtactcgatgctatgaaatctgctggccttcaacctgatgatgttgtatatgctacacttcttaacggttactgtaaaattggaaggatcgccgatggattgagccttttcagggaaatgtcactcagcggggttaagcccatgactattatatacaacattatactggatgggctgttttgctccgggagaacagtttgtgcaaaggaaaaattcaatacgatgactgaaagtggcataccagtgggcgttgacacatacaacatactccctctggaaagatttataagacgttttagaaagtgtagttcaaatctcggcacgttaagaaaattcggtcgtttccatttttgcccctgcgctcactcactcacccgcactcacccattcccctctcgcactcactcgcccgcgtcgacgtctccctgcccgaatccggcgcggtggcgacgctcctccctctcgcccgcgtcgacacctccccctcggccgcttcgcagcctcccttctcctcttgtcgccgcctctccctctcctcgcccgcgttgtctagccaaaattgttttcttagtgaggtcagga

SEQ ID NO: 1695 - DNA, 2109 bp, Triticum aestivum; identical to SEQ ID NO: 1694
  source 1..2109: mol_type = genomic DNA

SEQ ID NO: 1696 - DNA, 825 bp, Triticum aestivum
  source 1..825: mol_type = genomic DNA
atgccgagaagaagccggcccgcaggtggcatcctcatgggctgcttctgcggtgcgcatcgcccggacctagggcttgccttatttggccgcttcctcgggacaggcctcaagacaaacaagattgtggccaccaccttcctcaagtgcctctgctacgccaaacgtacagatgaggctgtcaacttgctgcttcgtaggatgcccgagcttggctgcgtgcctgatgcaatctcatacaccattgttctgaagagcttatgcgagaatagcatgagtcagcgggcacttgacctgctccagatggtggcagaaggaggaggtgcctgctccctcaatgtggtggtgtatagcacagtcatccatggcttcttcaaggagggcgaaacaggcaaggcatgcaatctattccatgaaatgatccatcaaggggttgtgcccaatgtggtcacgtatagctcgattattgatgcgttgtgcaaggccagagcaatggacaaggcagagctagtccttcaacagatggttgatagtggtgctcaaccgaataatgtgacatataattgcatgatccatggatattccacatcagggcagttgaaagaggctgctaaaatgtttagaaaaatgacaagccatggtcttgtaccaaatgcagtcacttgcagctcgttaatgacttccctttgcaagcatggaagaagcaaagaagcggcggaaatattttattccatgactgccaagggccacaaaccggatgccgtctcgtaccgtattttgcttcatgggtatgccaatgaaggatgctttgctgatatgattgat

SEQ ID NO: 1697 - DNA, 825 bp, Triticum aestivum; identical to SEQ ID NO: 1696
  source 1..825: mol_type = genomic DNA

SEQ ID NO: 1698 - DNA, 2421 bp, Triticum aestivum
  source 1..2421: mol_type = genomic DNA
atgccagccgcccgcctgtcctccatctccacctcctccttcaaggctccttcacgagagggccgagcccccctcgccgccttggctgctgccacggagcgcgtcctcgccggaacgctaagtcgccaggacgcgcaccatctgttcgacgaattgctgagccaagccgccgccgtcccggaacgcgggctcaacaactctcttgccgcactcgcccgtacaccgccctcagctgcctgcagcgatggccccggccttgccatcgccctcttcaaccgcatgtccagaggtgccggtgcactagtggcatcgtccacactctgtacctattccatcctcatggactgctgctgtcgcgcaggccgcccggacctggttgttgccttcttcggccgcctcctcaggttggggctgcgcttgaatgtcatctccttcaacaacctcctcaaggggctttgccaggctaagcgctcaaatgaggcattggatctgctgctccaccggatgcccgaactggactgtgcgcctgatgtcttctcgttcaacatagtaatcaacggctgctttagagaaggtgaagtagacaaagcatgcaatctcttccatgagatgccccaactgggagttcaacctgatgtggtgatctacaactcaattatcgacacactaagcaaatccggagcaatggacaaggcagaagtggtccttcgtcaaatggttgataaaggcattggacccgatgtcatgacatataacagtctgatccatggatattctactttgggtcagtggaaggcagcagttagggtattcaaagagatggtaagtgttggtgttctaccaaatgctgtcacgttgaactcatttatggattcactttgcaagcatagaagaacaaaggaagctagagatatttttgactccatggctgcaaagggccacaaacctaatattgcctcctactctactatgcttaatgggtatgcgaaacaaggatgcttcgacgatatgactggtctcttcaattccatggtacagaacggtattgtacctaacaaccatgttttcaacatactgatcagagcatattctacacgtggactgatggacaaggctatgcacatgttcgaagtaatgaagcaacaaggagtaaacccaaatgtagttgactatctagtaataatggattcactttgtaaaatgggtaggatggatgctgctctggacaaatttaatcagatggtcaatcaaggagtttcacctgacaaagttgtttaccgatgcctggttttaggttcttgctctcatggtcattttgtgaaagccaaggaattgatttctaaagcagttaatagaggtctatgttctaacagtgagttcttctatcctgtaataaacgacctgtgcaaagaaggaaaggtgaaggaggcacaggatatgtttgacttcattgtaggtattggtcagcggcctgatgtgattatgtacaattcactgatggatggatattgccttgttggcaaggtggaggaagcagtgagagtacttgatgctatgaagtctgctggcctccaacctactgctgttacgtatgctatacttcttaatggctactgtaaaattggaaggatcgccgctggattgagtcttttcatggaaatgtcactcagcggggttaagcccactactattatgtacaacattatacctgatgggctgttttgctctgggagaacagtttctgcaaaggagaaattcaatacgatgattgaaagtggcataccagtgggcgttgacacatacaacatagttcttcatggactttgtagaaacaattgcactgatgaagcaatagatttgttcaaaaaattatgtgcaagaaacgtgaagattgatgtcataacattcaataccgtgatttctgcaatgtttaaaactaggagaattgaagaagccaaggatttgtttgctactataccagccatcggattggtgccttctgttgtgacttacagtttaatgatgacgaatttcataaaagaagggtcgctggcagaggctgatgatatgtttttagcaatggagaaggatggctgtgctcctgactccagactgctaaatcaagtggtcagggtgttgctggaaaaaggtgcagttgtacaggctgcaacttatctggctaaacttgatgcaaaacaaatgtcacttgaagtgtcaacgatttcgttaattgtatatctcttctcaaggaaagggaaattaagggagcacgtaaaattgcttccgatgagtaccagcctccggagatgtcctactgatgttacttggtggtattcactcatagctgacagaatgtcattgcccccacctgccgtttttgaaaatgcagataattcatccattttgctgttgcctgatgtt

SEQ ID NO: 1699 - DNA, 1218 bp, Triticum aestivum
  source 1..1218: mol_type = genomic DNA
atggactgttgctgccgcgcgcgtcgcccggacctagggcttgccttattcggacgcttcctcaggacaggcctgaagacaaatgagatcatcgccaacaccttcctcaagtgcctctgctatgccaaacgtacaaatgaggctatcaacttgctgcttcataggatgcccgagcttggctgcgtgcctgatgccttctcatacaacattgttctgaagagcttatgcgagaatagcatgagtcagcgggcactcgacctgctccagatggtggcagaaggaggaggtgcctgctccctcaatgtggtggcgtatagcacagtcatccatggcttcttcaaggagggcgaaacaggcaaggcatgcaatctattccatgaaatgatccatcaaggggttgtgcccaatgtggtcacgtatagctctattattgatgcgttgtgcaaggccagagaaatggacaaggcagagctagtccttcaacagatggttgatagtggtgctcaaccgaataatgtgacatataattgcatgatccatggatattccacatcagggcagttgaaagaggctgctaaaatgtttagaaaaatgacaagccatggtcttgtaccaaatgcagtcacttgcagctcgttaatgacttccctttgcaagcatggaagaagcaaagaagcggcagaaatattttattccatgactgccaagggccacaaaccggatgccgtctcgtaccgtattttgcttcatgggtatgccactgagggatgctttgctgatatgattgatctcttcaattcaatggaaagcaatggttttgtagcagactgccatgttttcaccatattaattgatgcatatgctaaacgtggaatgatggatgaagctatgctcatatttaccgaaatgcaggaaaaaggagtgagtcccaatgtagtcacctattccactgtaatagccgcactttgcagattgggtaggctggccgatgctatggacaagttcaatgagatgattgatatgggtgttcagccgggcacaactgtttatcactccctaattcaggggttttgtatgcatgtagatttggttaaagccaaggagttagtttctgacatgataagcaaaggtattcctcgtcccaacattgtttttcttcaattcagttataaactatttgtgcaaagaaggacgggttatggatgcacaagatatctt

SEQ ID NO: 1700 - DNA, 894 bp, Triticum aestivum
  source 1..894: mol_type = genomic DNA
atggatgcacaagatatctttgaattggttataagcatagatgggaagcctgatgtcattacatttaactcactgattgacggatattgcttagtcggcaagatggataaagcatttggagtacttgatgccatggtgtcagctggcattgagcctaatgttgttacatataatacacttgttaatggctattctagaaatggaaggatcgatgatggtttgactctgttcaggcaaatgccacgtaagagaataaaacctgacagtgctacatatggcatcatactggatgggttgtttcgtgctgggagaactgttgctgcaaggaaaatgttccatgagatgatcgaaagcggaataacagtgagcatttccacatacaatattatacttgcaggtctttctagaaacaattgtgcagaagaagcgatcgacttgtaccagaaattagttgcaatgaatgtgaagttcaatatttcaataatcaataccatgatcaatgcaatgtacaaggttaaaagaaaagaggaagctaaagatttgtttgctgctatatcagcgagtgggttggttcctaatgcttcgacttatggagtaatgataataaatattctaaaagatggagcagtggaagatgctaacaatatgttctcagcaatggacaggaatggtatagctccctgctctcgtcttataaatagtattatcagaattttgctggaaaaaggtgagatcaccatggccggactttatttgtcgaaacttgacgggaagaacatgttacttgaagcttcaactacttcactgatgttgtctctcttttcaaggaaagggaaatataaggaggatgtgaaatttctccctgcaaagtatcagttttttgatggatttggt

SEQ ID NO: 1701 - DNA, 2472 bp, Triticum aestivum
  source 1..2472: mol_type = genomic DNA
atgtcccgcctccgcctccgccgctcctccaccacgccgatgttccacctcctccgccgcagctcctcctctacctccatctcgcccccctcacgttcctggtctcccgaaggcgcctttgccgcggccacggcgcgcgtcagcgctggaacgctcagccctgaagaagcacaccacctgttcgacgaattgctgcggcagggcaccccggtccccagccgctccctgaacggcttccttgccacccttgcccgtgcgcccgcctccgcagcctacagcagagatggccctgccctcgccctcgctctcttcaaccgcgtgtgcacagaaaaagccggctcgcgggtggcgcatctcacagtccacacctacggcatcctcatggactgctgctgccgcgcgcgtcgcccggacctagggcttgccttattcggacgcttcctcaggacaggcctgaagacaaatgagatcatcgccaacaccttcctcaagtgcctctgctatgccaaacgtacaaatgaggctatcaacttgctgcttcataggatgcccgagcttggctgcgtgcctgatgccttctcatacaacattgttctgaagagcttatgcgagaatagcatgagtcagcgggcactcgacctgctccagatggtggcagaaggaggaggtgcctgctccctcaatgtggtggcgtatagcacagtcatccatggcttcttcaaggagggcgaaacaggcaaggcatgcaatctattccatgaaatgatccatcaaggggttgtgcccaatgtggtcacgtatagctctattattgatgcgttgtgcaaggccagagcaatggacaaggcagagctagtccttcaacagatggttgatagtggtgctcaaccgaataatgtgacatataattgcatgatccatggatattccacatcagggcagttgaaagaggctgctaaaatgtttagaaaaatgacaagccatggtcttgtaccaaatgcagtcacttgcagctcgttaatgacttccctttgcaagcatggaagaagcaaagaagcggcagaaatattttattccatgactgccaagggccacaaaccggatgccgtctcgtaccgtattttgcttcatgggtatgccactgagggatgctttgctgatatgattgatctcttcaattcaatggaaagcaatggttttgtagcagactgccatgttttcaccatattaattgatgcatatgctaaacgtggaatgatggatgaagctatgctcatatttaccgaaatgcaggaaaaaggagtgagtcccaatgtagtcacctattccactgtaatagccgcactttgcagattgggtaggctggccgatgctatggacaagttcaatgagatgattgatatgggtgttcagccgggcacaactgtttatcactccctaattcaggggttttgtatgcatgtagatttggttaaagccaaggagttagtttctgacatgataagcaaaggtattcctcgtcccaacattgtgttcttcaattcagttataaactatttgtgcaaagaaggacgggttatggatgcacaagatatctttgaattggttataagcatagatgggaagcctgatgtcattacatttaactcactgattgacggatattgcttagtcggcaagatggataaagcatttggagtacttgatgccatggtgtcagctggcattgagcctaatgttgttacatataatacacttgttaatggctattctagaaatggaaggatcgatgatggtttgactctgttcaggcaaatgccacgtaagagaataaaacctgacagtgctacatatggcatcatactggatgggttgtttcgtgctgggagaactgttgctgcaaggaaaatgttccatgagatgatcgaaagcggaataacagtgagcatttccacatacaatattatacttgcaggtctttctagaaacaattgtgcagaagaagcgatcgacttgtaccagaaattagttgcaatgaatgtgaagttcaatatttcaataatcaataccatgatcaatgcaatgtacaaggttaaaagaaaagaggaagctaaagatttgtttgctgctatatcagcgagtgggttggttcctaatgcttcgacttatggagtaatgataataaatattctaaaagatggagcagtggaagatgctaacaatatgttctcagcaatggacaggaatggtatagctccctgctctcgtcttataaatagtattatcagaattttgctggaaaaaggtgagatcaccatggccggactttatttgtcgaaacttgacgggaagaacatgttacttgaagcttcaactacttcactgatgttgtctctcttttcaaggaaagggaaatataaggaggatgtgaaatttctccctgcaaagtatcagttttttgatggatttggt

SEQ ID NO: 1702 - DNA, 894 bp, Triticum aestivum; identical to SEQ ID NO: 1700
  source 1..894: mol_type = genomic DNA

SEQ ID NO: 1703 - DNA, 1218 bp, Triticum aestivum; identical to SEQ ID NO: 1699
  source 1..1218: mol_type = genomic DNA

SEQ ID NO: 1704 - DNA, 2472 bp, Triticum aestivum; identical to SEQ ID NO: 1701
  source 1..2472: mol_type = genomic DNA

SEQ ID NO: 1705 - DNA, 894 bp, Triticum aestivum; identical to SEQ ID NO: 1700
  source 1..894: mol_type = genomic DNA

SEQ ID NO: 1706 - DNA, 894 bp, Triticum aestivum; identical to SEQ ID NO: 1700
  source 1..894: mol_type = genomic DNA

SEQ ID NO: 1707 - DNA, 1218 bp, Triticum aestivum; identical to SEQ ID NO: 1699
  source 1..1218: mol_type = genomic DNA

SEQ ID NO: 1708 - DNA, 1218 bp, Triticum aestivum; identical to SEQ ID NO: 1699
  source 1..1218: mol_type = genomic DNA

SEQ ID NO: 1709 - DNA, 1605 bp, Triticum aestivum
  source 1..1605: mol_type = genomic DNA
atgatggtgttggaccttaatgtgacgtatagtagcctcatccatggatattcctcttcaggccactggaaggaggcagttagggtattcaaagagatgacaagtcggagggttacagcagatgtgcatacttacaacatgtttatgacctttctttgcaaacatggaagaagcaaagaagctgcaggaatttttgataccatggctatcaagggcctgaaacctgacaacgtttcatatgctattctccttcatgggtatgccgccgaaggatgcttagttgatatgattaatctcttcaattcaatggaaagagattgtattctacctgactgtcgtatcttcaacatactgattaatgcatatgctaaatctgggaagcttgataaggctatgcttatcttcaatgaaatgcagaaacaaggagtgagtccaaatgcagtcacatattcaaccgtaatacatgcattttgcaagaagggtaggttggatgatgctgtgataaagtttaatcagatgattgatacaggagtacgaccggacgcatctgtttatcgtcccctaatccagggtttttgtacacatggcgatttggtgaaagcaaaggaatatgttactgaaatgatgaagaaaggtatgcctcctcctgatattatgttcttcagttcaatcatgcagaacctatgcacagaaggaagggtaacagaagcacgggatatccttgacttgatagtgcacattggtatgaggcctaatgttatcatatttaatttgctgatcggtggatactgcctagtccgcaagatggcagatgcattgaaagtatttgatgatatggtgtcatatggtttagaaccttgtaactttacgtatggtatacttattaatggctattgcaaaaatagaaggattgatgacgggcttattctgttcaaagagatgctgcacaagggacttaaacctacaacttttaattataacgtcatactggatggattatttctggctggacaaactgttgctgcaaaagagaagtttgatgagatggttgaatctggagtaagtgtgtgcattgatacatactctataattcttggtggactttgtagaaatagctgcagtagcgaagcgatcacccttttccggaaattaagcgcaatgaatgtgaaatttgatattacaattgtcaatatcattattggtgccttatacagggtcgagagaaaccaagaggctaaggatttgtttgctgctatgccagccaatggcttggttcctaatgctgttacctacaccgtaatgatgacaaatcttataaaagaaggttcagtggaagaagctgacaatcttttcttatccatggagaagagcggctgtactgccaactcttgcctgttaaatcatatcatcagaaggttactggaaaaaggagagatagtcaaggctggaaattatatgtctaaagttgatgcaaagagctactcacttgaagctaaaactgtttcgctgctgatctctctgttttcaaggaaagggaaatatagagaacacatcaaattgcttcctacaaagtatcagtttctggaagaagcagccacagttgaa

SEQ ID NO: 1710 - DNA, 2364 bp, Triticum aestivum
  source 1..2364: mol_type = genomic DNA
atgccccgcttctcctccaccacgccaatgtcgccaccccgcctccgcctccgactctgcgcccgccactcctcctccacctctcatccctcacgcatctgggatccccacgccgccttcgccgccgcggcacagcgggcgagctctggcacgctcactacggaggacgcacaccacctgtttgacgaattgctgcggcggggcaatcctgtccaggagcgtcccttgaataaatttctggctgccctcgcccgcgcgcccgcgtccgcatcctgctgcgatggccccgccctggcagtcgccctcttcggccgtttgtcccgagacgtcggacgacgggtggcgcagccaaatgtcttcacctatggcgtcctcatggactgctgctgccgcgcttgccgcacagatctggtgctcgccttctttggccgtctcctcaagacgggcctggaggcaaaccaagtcgtcttcaacaccctcctcaagggcctttgccacacaaagcgggcggatgaggctctggacgtgctgcttcacaggatgcctgagctgggctgcactcctaatgtggtggcgtataacaccgttatccatggcttctttaaggaaggccatgtaagcaaggcctgcaatctgttccatgaaatggcgcagcagggcgttaagcctaatgtggtgacatataactcagttatcgatgcgctgtgcaaggccagagccatggacaaggcagaggtggtccttcgtcagatgattgatgatggtgttggacctgataatgtgacgtatagtagcctcatccatggatattcctcttcaggccactggaaggaggcagttagggtattcaaagagatgacaagtcggagggttacagcagatgtgcatacttacaacatgtttatgacctttctttgcaaacatggaagaagcaaagaagctgcaggaatttttgataccatggctatcaagggcctgaaacctgacaacgtttcatatgctattctccttcatgggtatgccgccgaaggatgcttagttgatatgattaatctcttcaattcaatggaaagagattgtattctacctgactgtcgtatcttcaacatactgattaatgcatatgctaaatctgggaagcttgataaggctatgcttatcttcaatgaaatgcagaaacaaggagtgagtccaaatgcagtcacatattcaaccgtaatacatgcattttgcaagaagggtaggttggatgatgctgtgataaagtttaatcagatgattgatacaggagtacgaccggacgcatctgtttatcgtcccctaatccagggtttttgtacacatggcgatttggtgaaagcaaaggaatatgttactgaaatgatgaagaaaggtatgcctcctcctgatattatgttcttcagttcaatcatgcagaacctatgcacagaaggaagggtaacagaagcacgggatatccttgacttgatagtgcacattggtatgaggcctaatgttatcatatttaatttgctgatcggtggatactgcctagtccgcaagatggcagatgcattgaaagtatttgatgatatggtgtcatatggtttagaaccttgtaactttacgtatggtatacttattaatggctattgcaaaaatagaaggattgatgacgggcttattctgttcaaagagatgctgcacaagggacttaaacctacaacttttaattataacgtcatactggatggattatttctggctggacaaactgttgctgcaaaagagaagtttgatgagatggttgaatctggagtaagtgtgtgcattgatacatactctataattcttggtggactttgtagaaatagctgcagtagcgaagcgatcacccttttccggaaattaagcgcaatgaatgtgaaatttgatattacaattgtcaatatcattattggtgccttatacagggtcgagagaaaccaagaggctaaggatttgtttgctgctatgccagccaatggcttggttcctaatgctgttacctacaccgtaatgatgacaaatcttataaaagaaggttcagtggaagaagctgacaatcttttcttatccatggagaagagcggctgtactgccaactcttgcctgttaaatcatatcatcagaaggttactggaaaaaggagagatagtcaaggctggaaattatatgtctaaagttgatgcaaagagctactcacttgaagctaaaactgtttcgctgctgatctctctgttttcaaggaaagggaaatatagagaacacatcaaattgcttcctacaaagtatcagtttctggaagaagcagccacagttgaa

SEQ ID NO: 1711 - DNA, 774 bp, Triticum aestivum
  source 1..774: mol_type = genomic DNA
atgccccgcttctcctccaccacgccaatgtcgccaccccgcctccgcctccgactctgcgcccgccactcctcctgcacctctcatccctcacgcatctgggatccccacgccgccttcgccgccgcggcacagcgggcgagctctggcacgctcactacggaggacgcacaccacctgtttgacgaattgctgcggcggggcaatcctgtccaggagcgtcccttgaataaatttctggctgccctcgcccgcgcgcccgcgtccgcatcctgctgcgatggccccgccctggcagtcgccctcttcggccgtttgtcccaagacgtcagacgacgggtggcgcagccaaatgtcttcacctatggcgtcctcatggactgctgctgccgcgcttgccgcacagatctggcgctcgccttctttggccgtctcctcaagacgggcctggaggcaaaccaagtcgtcttcaacaccctcctcaagggcctttgccacacaaagcgggcggatgaggctctggacgtgctgcttcacaggatgcctgagctgggctgcactcctgatgtggtggcgtataacaccgttatccatggcttctttaaggaaggccatgtaagcaaggcctgcaatctgttccatgaaatggcgcagcagggcgttaagcctaatgtggtgacatataactcagttatcgatgcgctgtgcaaggccagagccatggacaaggcagaggtggtccttcgtcagatgattgatgatggtgttggacct

SEQ ID NO: 1712 - DNA, 2364 bp, Triticum aestivum; identical to SEQ ID NO: 1710
  source 1..2364: mol_type = genomic DNA

SEQ ID NO: 1713 - DNA, 1626 bp, Triticum aestivum
  source 1..1626: mol_type = genomic DNA
atgccgaccggccggctgtcctccatcttcaccagcaatgcaacctcctccttcagggctccttcgccacagccacgagcccccctcgccgccttggctgccgccacggagcgcgtccgcgccggaacgctaagtcggcaggacgcgcaccacctgttcgacgaattgctgagccaagccgcgacagtcccagtacgcacgctcaacaattttcttgccgccctcgcccgtgctccgccctcagctgcctgtggcgatggccctgcccttgccatcgccctcttcaaccgcatgtcccaaggcgctggtgcacgggtggtgtcgcccacgctctgtacctattccatcctcatggactgctgctgccgcgcaggccgcccggacttggtggttgccttcttcggccgcctcatcaggttggggctgcgcttgaatgtcatccccttcaacaacctcctcaaggggctttgcaaggccaagcgctcaaatgaggcattggatctgctgctccaccggatgcccgaactggactgtgcgcctgatgtcttctcgtacagcatagtaatcaacggctgttttaaagaaggtgaagtagacaaagcgtgcaatctcttccatgggatgatccaactgggagttcaacctaatgtggtcatctacacctcaattatcgatgcactaagcaagtgcggagccatggacaaggcagaagtggtctttcggcaaatggttgataaaggtattggacccgatgtcatgacatgcactagtctgatccatggatattccatttcgggtaggtggaaggcggcagtaagggtattcaaagagatgataagtcttggtgttgtaccagataccgtcatgtggaactcatttgtggattcactttgcaagcatagaaggacaaaggaagctagagttatttttgactccatggctgcaaagggccagaaacctgatactgtctcctactctattatgcttaacgggtatgtgaaagaaggatgctttgatgatatgaccggtctcttcaattcgatgctacagaacggtgttgtacctaaccaccatattttcaacatactgatcaatgcatatgctaaacgtggactgatggatgaggctatgcacatgttcgaagtaatgaggcaacaaggagtaaacccagatgtagttgactatctagtagtaatggattcactttgcaaaatgggtaggatggatgctgctctggacaaatttaatcagatggtcaatcaaggagtttcacctaacaaagctgtttaccaatgcctggttctgggttcttgctctcatggtgattttgtgaaagccaaggaattgatttctgaagcacttaatagaggtctctgttctaacagtgtgttcttctatcctgtaataaacgacctgtgcaaagaaggaaaggtgaaggaggcacaggatatgtttgacttcattgtaggtattggtcagcggcccgatgtgattatgtacaattcactgatggatggatattgccttgttggcaaggtggaggaagcactgagagtacttgatgctatgaagtctgctggcctccaacctgatgctattatgtatggtatacttcttaatgatcac

SEQ ID NO: 1714 - DNA, 2328 bp, Triticum aestivum
  source 1..2328: mol_type = genomic DNA
atgccgaccggccggctgtcctccatcttcaccagcaatgcaacctcctccttcagggctccttcgccacagccacgagcccccctcgccgccttggctgccgccacggagcgcgtccgcgccggaacgctaagtcggcaggacgcgcaccacctgttcgacgaattgctgagccaagccgcgacagtcccagtacgcacgctcaacaattttcttgccgccctcgcccgtgctccgccctcagctgcctgtggcgatggccctgcccttgccatcgccctcttcaaccgcatgtcccaaggcgctggtgcacgggtggtgtcgcccacgctctgtacctattccatcctcatggactgctgctgccgcgcaggccgcccggacttggtggttgccttcttcggccgcctcatcaggttggggctgcgcttgaatgtcatccccttcaacaacctcctcaaggggctttgcaaggccaagcgctcaaatgaggcattggatctgctgctccaccggatgcccgaactggactgtgcgcctgatgtcttctcgtacagcatagtaatcaacggctgttttaaagaaggtgaagtagacaaagcgtgcaatctcttccatgggatgatccaactgggagttcaacctaatgtggtcatctacacctcaattatcgatgcactaagcaagtgcggagccatggacaaggcagaagtggtctttcggcaaatggttgataaaggtattggacccgatgtcatgacatgcactagtctgatccatggatattccatttcgggtaggtggaaggcggcagtaagggtattcaaagagatgataagtcttggtgttgtaccagataccgtcatgtggaactcatttgtggattcactttgcaagcatagaaggacaaaggaagctagagttatttttgactccatggctgcaaagggccagaaacctgatactgtctcctactctattatgcttaacgggtatgtgaaagaaggatgctttgatgatatgaccggtctcttcaattcgatgctacagaacggtgttgtacctaaccaccatattttcaacatactgatcaatgcatatgctaaacgtggactgatggatgaggctatgcacatgttcgaagtaatgaggcaacaaggagtaaacccagatgtagttgactatctagtagtaatggattcactttgcaaaatgggtaggatggatgctgctctggacaaatttaatcagatggtcaatcaaggagtttcacctaacaaagctgtttaccaatgcctggttctgggtttttgctctcatggcgattttgtgaaagccaaggaattgatctctgaaacaattaatagaggtctgtgttctaacaatgtgttcttctatcctgtaataaacgacctgtgcaaagaaggaaaggtgaaggaggcacaggatatgtttgacttcattgtaggtattggtcagcggcccgatgtgattatgtacaattcactgatggatggatattgccttgttggcaaggtggaggaagcactgagagtacttgatgctatgaagtctgctggcctccaacctgatgctattacgtatgctatacttcttaatggctactgtaaaattggcaggatcgccgatggattgagtcttttcagggaaatgtcactcagcggggttaagcccacgactattatgtacagcattatacttgatgggctgtttcgctccgggagaacagtttctgcaaaggaaaaattcaatacgatggttgaaagtggcttaccagtggacgttcgcacatacaacatagttcttcatggactttgtagaaacaattgcactggtgaagcaatagagttgttcaaaaaattatgtgcaacgaacgtgaagattaatgtcataacattcaataccatgatttctgcaatgtttaaaactaggagaattggagaagccaaggatttgtttgctactatatcagccatcgggttggtgccttctgttgtgacttacagtgtaatgacgacgaatttcataaaagaagggttgctggcggaggctgatgatatgtttttagcaatggagaaggctggctgtgctcccaactccaggctgctaaatcacgtggtcagagtgttgctggagaatggtgcagttgtaaaggctgcaacttatctcgctaaacttgatgcaaaacagctttcacttgaagcttcgacagtttcgttaattgtatctctcttctcaaggaaagggaaattaagggagcatgtaaagttgcttccggtaaagtaccagcctcctgagatgttggac

SEQ ID NO: 1715 - DNA, 2007 bp, Triticum aestivum
  misc_feature 82: note = n is a, c, g, or t
  source 1..2007: mol_type = genomic DNA
atgcatcaaggcgttggatgcactgacccgagcggacggggacaaaatccacgcccgtcggcaacctctcacccctccctcnccgttcacagtctagattcgtcagccgcctcccaggccgctcgccggcggccaggaccaccggagttcctgagtctcctttctctccgacggaggcacgcctcctcttcatcgccactgttgagggcatcggttgcaaccccgcggcggcggcgagcggttcccccgagtgcttggttagtgccgagcatcgcgggtgacgccactagagcgcggtgcggcggcgcacgcacggtcagccttcccggagggcaagacccgcggcagttgcgcgccgagctccgctggagacggccagcaatgccgaccggccggctgtcctccatcttcaccagcaatgcaacctcctccttcagggctccttcgccacagccacgagcccccctcgccgccttggctgccgccacggagcgcgtccgcgccggaacgctaagtcggcaggacgcgcaccacctgttcgacgaattgctgagccaagccgcgacagtcccagtacgcacgctcaacaattttcttgccgccctcgcccgtgctccgccctcagctgcctgtggcgatggccctgcccttgccatcgccctcttcaaccgcatgtcccaaggcgctggtgcacgggtggtgtcgcccacgctctgtacctattccatcctcatggactgctgctgccgcgcaggccgcccggacttggtggttgccttcttcggccgcctcatcaggttggggctgcgcttgaatgtcatccccttcaacaacctcctcaaggggctttgcaaggccaagcgctcaaatgaggcattggatctgctgctccaccggatgcccgaactggactgtgcgcctgatgtcttctcgtacagcatagtaatcaacggctgttttaaagaaggtgaagtagacaaagcgtgcaatctcttccatgggatgatccaactgggagttcaacctaatgtggtcatctacacctcaattatcgatgcactaagcaagtgcggagccatggacaaggcagaagtggtctttcggcaaatggttgataaaggtattggacccgatgtcatgacatgcactagtctgatccatggatattccatttcgggtaggtggaaggcggcagtaagggtattcaaagagatgataagtcttggtgttgtaccagataccgtcatgtggaactcatttgtggattcactttgcaagcatagaaggacaaaggaagctagagttatttttgactccatggctgcaaagggccagaaacctgatactgtctcctactctattatgcttaacgggtatgtgaaagaaggatgctttgatgatatgaccggtctcttcaattcgatgctacagaacggtgttgtacctaaccaccatattttcaacatactgatcaatgcatatgctaaacgtggactgatggatgaggctatgcacatgttcgaagtaatgaggcaacaaggagtaaacccagatgtagttgactatctagtagtaatggattcactttgcaaaatgggtaggatggatgctgctctggacaaatttaatcagatggtcaatcaaggagtttcacctaacaaagctgtttaccaatgcctggttctgggttcttgctctcatggtgattttgtgaaagccaaggaattgatttctgaagcacttaatagaggtctctgttctaacagtgtgttcttctatcctgtaataaacgacctgtgcaaagaaggaaaggtgaaggaggcacaggatatgtttgacttcattgtaggtattggtcagcggcccgatgtgattatgtacaattcactgatggatggatattgccttgttggcaaggtggaggaagcactgagagtacttgatgctatgaagtctgctggcctccaacctgatgctattatgtatggtatacttcttaatgatcac

SEQ ID NO: 1716 - DNA, 2217 bp, Triticum aestivum
  source 1..2217: mol_type = genomic DNA
atgccctctgaggcctgcagagacggccccttcctcgccctcaccctcttcaaccgtgtctgccgagaagaagccggcatgcgggttgcgccgccaaccatcttcacctacggcatcctcatgaactgctgctgccgtatgggtcgtccggacctagggctcgcctactttgggcgcatcctcagggcgggcctgaaggcaaaccagatcgccgccaacaccgtcatcaagtgcctctgctgcgcaaaacatagtgacgaggctgtcaatatgctgcttcataggatgtccgacctcggctgtgtgcctgatgccttctcatacaacaccgttctgaagagcttgtgtgaagatggcaggagcttgcaggcgctcgacctactgctccagatggcgtcgaaggaaggaggtgcctgctcccccgacatggtggcatatagcacggtcatccacggcttcttgaaggaaggcaaagtagacaaggcatgcaatctgttcgatgaaatgatgcggcaaggggttgtgcctgatgtggtgacgtatagctcgattatcgatgcattgtgcaaagctggagcaatgtacaaggcagagttgttcctttggcagatggttgatgatggtgttcgaccggatgaggtgacatatactagcatgatccatggatattccactttgggccggtggaaacaggtgcgtaaaatgttcagagaaatgacaagccgtggtcttataccagatactgtcacttggaactcgttcatggactccctctgcaagcatggaagaaccaaagaagctgcagaagttttcttttccatggctggaaagggcagcaagcctaatattgtctcctacactattcttcttcatgggtatgccaatgaaggaagctttgctgatatgatgagtctcttcaattcaatgaaaggcggcggcattgtagccaactgcaaagttttcaacatattaattggtgcatatgctaaacgagggctgatagatgaagctatgcttatacttactgaaatgcggggacaaggactgagtccggatgtagtcacctattcaactctaatatctgcacattggagaatgggtaagctgactgatgccatggataagttcagtcagatggttgttggtacgggagtacagccggacacagttgtttatcactccctagttcagttcttatgtacacatggtgatttggtgaaagcgaaggagttgatttctgaaatgatgaataaaagtattgctcgtccaaacactgcactcttcagttcaataatggacagtctatgcaatgaaggaagggttatagatgcacaccatatctttgacttggttatagacataggtgagaaacctgatatcagtatgtttagtacgctgattgacggatattgcttagtcggcgagatggacaaagcatgtggagtacttgatgccatggtatcagctggcattgagcctaatgtcattacgtatagcacacttgtcagtagatattgtaaacgtggaaggatcgatgatgggttgattctgttcagacaaatgttgcataagaaagttaaacctacaactgttacatatgaaaccacactgaatggattatttcgtgctgggagaactgctgatgcgaagaaaatcttcgatgagatgatcgaaagtggaataatggtgagcatttctacatataatataattcttggaggactttgtagaaataattgcgcagatgaagcgatcatcctattccagaaattacgtgcaatgaatgtgaagttcaatatcacaacactcaataccatcattgatgcattgtacaaggttgaaagaagagaagaagctaatgatttatttgctgcattaccagccagcgggttggtgcctaatgcttccacttacggagtaatggtacaaaatcttctaaaagaaggagcagtggaggaagctgacagtatgttctcatcaatggagaagagtggttgtgctcctagctctcgtcttgtaaatgatgtcatcagaactttattggaaaagggggagatagtcaaggccggaaaatatatgtctaaagttgatgagaagagcatctcacttgaagcttcaactagttcgttgttgttgtctctcttttcagggaatgggaaatatcgggaacaactacaattgctccctgcaaagtaccaatttttcgatggaatcagt

SEQ ID NO: 1717 - DNA, 2475 bp, Triticum aestivum
  source 1..2475: mol_type = genomic DNA
atgtcccgcctccgcctccgccactgctcctgcttcaccacgcccatgtcccgcatccgcctccgccgccgcctctcctcttccacctcacgacccacaccctcccggtctccccgcgccgcctttgcggcggccacggagcgtgtccgcgccggaacgctcagcccgcaagacgcacaccacctgttcgacgaattgtttcagcaggccaccccggtccccgagcgccccctcaacggattccttgccgccctcacccgtgccacgccctccgaagcctgcagagacggccccgctctcgccctctccctcttcaaccgtgtctgccgagaagaagccggcatgcgggtggcgccgcccaccatcttcacgtacggcgtcctcatgaactgctgctgccgcatgcgtcgtccggaacttgggctcgccttcttcggccgcctcctaaggacgggcctgaaggcagacaagatcgtcgccaacactgtcctcaagtgcctgtgctgcgctaaacgggcagacgacgctgtgaaagtgctgcttcataggatgaccgagctggggtgtgtgcctgatgccttctcatacgccattgtcctgaagagcttatgtgatgataacaggagccaacaggcgctctacctgctccggatgatggcgaaagaagaaggtgtgtgctcccctgacgtggtcacatataacaccgtcatccatggcttctttaaggaaggaaaaataggcaaggcctgcaatctattccatgaaatgacgaagcaagggtttgtgcctaatgtggtgacatataactcggttatcaatgcattgtgcaaggcccgagcaatggacaatgcagagttgttccttcggcagatggttgataacggcgttcaaccgaataaagtgacatatactagcatgatccatggatattccactttgggccagtggaaagaggcgactaaactgttcagagaaatgacaagcagtggtcttataccagatattgtcacttggaactcgttcattgactccctttgcaagcatggaagaagcaaagaagctgcagaaatttttcattccatgtctgcaaagggccacaagcctgatatcatctcctacaccactcttcttcatgggtatgccaatgaaggaagctttcctgatatgatgagtctctttaagtcaatggaaggcgacggtattgtagccaactgccaatttttcaacatattaattgatgcatatgctaaacgaggaatgatggacgaagctatgctcatatttactgaaatgccaggacaaggagtcaatccaaatgtagtcacctattcaactgtggtagcttcactttgcagaatgggtaggctggctgatgcaatgaataagttcagtgagatgattggtacgggagtacaaccgaacacagttgtttatcactccctagttcagggcttatgtacacatggtgatttggtgaaagcgaaggagttgatttctgaaatgatgaataaaggtattcctcgtccaaacattgcattcttcagttcaatagtacacagtctatgcaaagaaggaagggttatggatgcacaccatatctttgacttggttaaagacataggggagagatctgacatcattatgtttaatacgctgattgatggatattgcctagttggtgagatgggcaaagcagtcagtgtactagatgtcatgatatcagccggcattgagcctgatatctttacatataatacacttgtcaatggttattttaagagtggaaggatcgatgatgggttgaatctgttcagagaaatgtcacataagaaaattaaacctacaactgttacatataacatcatactggatggattatttcgtgctgggagaaccgttgctgccaagaaaatgctccatgagttgatcggatgtggaacaacagtgagcttgtccacatacaacataattcttaaaggactttgtagaaataattgcaccgacgaagcaatcgtcatgttccagaaattacacacaattaatgtaaagttcaatatcacaacactcaataccatgattaattcaatgtacactgttcagagaagagaagaagctaaaaatttgtttgctgcaatatcagacagcgggttggtgcccaatgcctctacatacggcataatgatacgaaatcttctaaaagaaggatcagtggaagaagctgacagtatgttcttatcaatggagaggagtggttgtgctccttgctctcgtcttttaaatgatactattagaacgttattggagaagggggagatagtcaaggccggaaattatatgtctaaagttgatggcaagagcatctcacttgaagcttcaacttgttcattgttgttgtctctgttttctgggaaaggtaaatatcgtgaacaaatacaattgctccctgtaaaataccaattcttcggtggagttagt

SEQ ID NO: 1718 - DNA, 2475 bp, Triticum aestivum
  source 1..2475: mol_type = genomic DNA
atgtcccgcccccgcctccgccactgctcctgcttcaccacgcccatgtcccgcatccgcttccgccgccgcctctcctcttccacctcacgacccacaccctcctggtctccccgcgccgcctttgcggcggccacggagcgcgtccgcgacggaacgctcagcccgcaagacgcacaccacctgttcgacgaattgtttcagcaggccaccccggtccccgaccgccccctcaacggattccttgccgccctcacccgtgccacgccctccgaggcctgcagagacggccctgctctcgccctctccctcttcaaccgtgtctaccgagaagaagccggcatgcgggtggcgccgccgaccatcttcacctacggcgtcctcatgaactgctgctgccgcatgcgtcgtccggaacttgggctcgccttcttcggccgcctcctaaggacgggcctgaaggaagacaagatcgtcgccaacactgtcctcaagtgcctgtgctgcgctaaacgggcagacgacgctgtgaaagtgctgcttcatacgatgaccgagctggggtgtgtgcctgatgccttctcatacgccattgtcctgaagagcttatgtgatgataacaggagccagcaggcgctctacctgctccggatgatggcgaaagaagaaggtgtgtgctcccctgacgtggtcacatataacaccgtcattcatggcttctttaaggaaggaaaaataggcaaggcctgcaatctattccatgaaatgacgaagcaagggtttgtgcctaatgtggtgacatataactcggttatcaatgcattgtgcaaggcccgagcaatggacaatgcagagttgttccttcggcagatggttgataacggcgttcaaccgaataaagtgacatatactagcatgatccatggatattccactttgggccagtggaaagaggcgactaaactgttcagagaaatgacaagcagtggtcttataccagatattgtcacttggaactcgttcattgactccctttgcaagcatggaaggagcaaagaagctgcagaaatttttcattccatgtctgcaaagggccacaagcctgatatcatctcctacaccactcttcttcatgggtatgccaatgaaggaagctttcctgatatgatgagtctctttaagtcaatggaaggcgacggtactgtagccaactgccaatttttcaacatattaattgatgcatatgctaaacgaggaatgatggacgaagctatgctcatatttactgaaatgccaggacaaggagtcaatccaaatgtagtcacctattcaactgtgatagcttcactttgcagaatgggtaggctggctgatgcaatgaataagttcagtgagatgattggtacgggagtacaaccgaacacagttgtttatcactccctagttcagggcttatgtacacatggtgatttggtgaaagcgaaggagttgatttctgaaatgatgaataaaggtattcctcgtccaaacattgcattcttcagttcaatagtacacagtctatgcaaagaaggaagggttatggatgcacaccatatctttgacttggttaaagacataggggagagatctgacatcattatgtttaatacgctgattgatggatattgcctagtcggtgagatgggcaaagcagtcagtgtactagatgtcatgatatcagccggcattgagcctgatatctttacatataatacacttgtcaatggttattttaagagtggaaggatcgatgatgggttgaatctgttcagagaaatgtcacataagaaaattaaacctacaactgttacatataacatcatactggatggattatttcgtgctgggagaaccgttgctgccaagaaaatgctccatgagttgatcggatgtggaacaacagtgagcttgtccacatacaacataattcttaaaggactttgtagaaataattgcaccgacgaagcaatcgtcatgttccagaaattacacacaattaatgtaaagttcaatatcacaacactcaataccatgattaattcaatgtacactgttcagagaagagaagaagctaaagatttgtttgctgcaatatcagacagcgggttggtgcccaatgcctctacatacggcataatgatacgaaatcttctaaaagaaggatcagtggaagaagctgacagtatgttcttatcaatggagaggagtggttgtgctccttgctctcgtcttttaaatgatactattagaacgttattggagaagggggagatagtcaaggccggaaattatatgtctaaagttgatggcaagagcatctcacttgaagcttcaacttgttcattgttgttgtctctgttttctgggaaaggtaaatatcgtgaacaaatacaattgctccctgtaaaataccaattcttcggtggagttagt

SEQ ID NO: 1719 - DNA, 2475 bp, Triticum aestivum; identical to SEQ ID NO: 1718
  source 1..2475: mol_type = genomic DNA

SEQ ID NO: 1720 - DNA, 2475 bp, Triticum aestivum; identical to SEQ ID NO: 1718
  source 1..2475: mol_type = genomic DNA

SEQ ID NO: 1721 - DNA, 2475 bp, Triticum aestivum; identical to SEQ ID NO: 1718
  source 1..2475: mol_type = genomic DNA

SEQ ID NO: 1722 - DNA, 2475 bp, Triticum aestivum; identical to SEQ ID NO: 1718
  source 1..2475: mol_type = genomic DNA

SEQ ID NO: 1723 - DNA, 2475 bp, Triticum aestivum; identical to SEQ ID NO: 1718
  source 1..2475: mol_type = genomic DNA

SEQ ID NO: 1724 - DNA, 2091 bp, Triticum aestivum
  source 1..2091: mol_type = genomic DNA
atgaactgctgccgccgcacgcgtcgtccggaacttgggctcgccttctttgggcgcgtcctcaggatgggcctgaggacaaacgtggtcgtcgccaccacggtcctccagtgcctctgcggcgccaaacggacagatgaggccgtggacatcctgctacatcggatgtccgagctcgggtgcgtgcctgatgccttctcatactccattgttctgaagagcttatgcgatgatggcaggagccagcgggcactcgacctgctccacatgtgggagaaagaacgaggtctctgctcccccaacgtagtgatgtataacacggtcatccacggcttctttaaggaaggtgaagtaagcaaggcatgcattctattccatgaaatggagcagaaaggggttgtgcctaatgtggtgacatatagcttgaccattgacgcgctgtgcaaggccagagctatggacaaagcacagttgttcctccggcagatgattgataaaggtgttcgaccgaacaatgtgacatataatgtcatgatccatggatattgcactctgggacagtggaaggaagcgcgtaaaatgttcagagaaatgacaagacagggtctcataccagatattgttacttggacctcgttcatggcctctctctgtaagcatggaagaaccaaagaagctgccgaattctttgattccatgactgccaagggccacaagcctgatttggtcatgtatcatgttctgctccatgggtatgcaaccaaaggatgctttgctgatatgattaatctctttaattcaatggcaaccaagggtattgtacccgatcgtcaggttttcaacattttaattgatgcacatgctaaacatggaatgatggatgaagctatgcacatatttactggaatgcagggacaaggagtgtgtccagatgtatggacctattcaactctaatatctgcactttgcagaatgggtaggctggctgatgccatggataacttcagtcagatgattggtaagggagtacaaccgaacacagttgtttatcactccctaattcagggtttctctacacatggtgatttgaggaaagcaaaggagttggtttatgaaatgacaaacaaaggtattccttgtccaaacattgcattcttcagttctgtaatggacagtatatgcaaagaaggaagggttatggatgcacatgatatcttccacttggttacagacataggtctgaaacctaacatcattacgtttaatacgctgattgatggacattgcttagccggtgagatggagaaagcatttggagtacttgattccatggtatcagctggcatcgaggctgatgtttttacatataatacacttgcttatggctattgtagatgtggaaggattgatgatgggttgattctattcagagaaatgttgcaaaacaaacctaaacccacaacaatcacatataacatcatactggatgggttatttcgtgctgggagaacatttgctgcaaagaaaatgttcgttgagatgattgaaacgggaataacagtgagcatttccacatacagtataatacttggaggactttgtaggaataattgctctgacgaagcgatcaccctatttcagaaattaggaacaatgaatgtgaagtttgatattaaaatactcaataccatgatcaatgccatgttcaaggttcggagaagagaagaaactaacggtttgtttgctgcaatatcagccagtgggatggtacctaatgcttctacctacagcgtaatgataggaaatcttctaaaagaaggatcagtggaagaagctgaaaatatgttctcattaatggagaagagtggttgtgctccagactctcgtcttataaataatatcatcagaatattgttggaaaacggtgacatcgtcaaggctggaaattatatgtctaaagttgatggcaagagcatctcacttgaagcttcaactacttcgttgttgatgtgtctcttttcaagtaaagggaaatatcgggaacaaatcagtttgctccctgtaaattaccaatttttcaatggagtcggt

SEQ ID NO: 1725 - DNA, 2472 bp, Triticum aestivum
  source 1..2472: mol_type = genomic DNA
atgtcccgcctccgccactccacctccaccgcgccgatgccccacctccgccttctccgctgccgctcctcctccatctccaccttgccgccgtcacgctcatggtctcccgtcaccgcctttgccgcggccacagagcgcgtcagcgctgggacgctcagtccggaagacgcacaccgcctgttcgacgaattgcttcggcaggccactccggtccccgcgcgctccctgaacggcttcctcacggccctctcccgtgcgccgggcaccggcgcctgcggagacggccccgccctcgccctcgccctcttcaaccgcacccgccgagaagaggccggctcccgggtggtgccgtccacaatcttcacctacggcatcctcatgaactgctgccgccgcacgcgtcgtccggaacttgggctcgccttctttgggcgcgtcctcaggatgggcctgaggacaaacgtggtcgtcgccaccacggtcctccagtgcctctgcggcgccaaacggacagatgaggccgtggacatcctgctacatcggatgtccgagctcgggtgcgtgcctgatgccttctcatactccattgttctgaagagcttatgcgatgatggcaggagccagcgggcactcgacctgctccacatgtgggagaaagaacgaggtctctgctcccccaacgtagtgatgtataacacggtcatccacgacttctttaaggaaggtgaagtaagcaaggcatgcagtctattccatgaaatggagcagaaaggggttgtgcctaatgtggtgacatatagcttgaccattgacgcgctgtgcaaggccagagctatggacaaagcacagttgttcctccggcagatgattgataaaggtgttcgaccgaacaatgtgacatataatgtcatgatccatggatattgcactctgggacagtggaaggaagcacgtaaaatgttcagagaaatgacaagacagggtctcataccagatattgttacttggacctcgttcatggcctctctttgtaagcatggaagaaccaaagaagctgccgaattctttgattccatgactgccaagggccacaagcctgatttggtcatgtatcatgttctgctccatgggtatgcaaccaaaggatgctttgctgatatgattaatctctttaattcaatggcaaccaagggtattgtacccgatcgtcaggttttcaacattttaattgatgcacatgctaaacatggaatgatggatgaagctatgcacatatttactggaatgcagggacaaggagtgtgtccagatgtatggacctattcaactctaatatctgcactttgcagaatgggtaggctggctgatgccatggataacttcagtcagatgattggtaagggagtacaaccgaacacagttgtttatcactccctaattcagggtttctctacacatggtgatttgaggaaagcaaaggagttggtttatgaaatgacaaacaaaggtattccttgtccaaacattgcattcttcagttctgtaatggacggtatatgcaaagaaggaagggttatggatgcacatgatatcttccacttggttacagacataggtctgaaacctaacatcattacgtttaatacgctgattgatggacattgcttagtcggtgagatggagaaagcatttggagtacttgattccatggtatcagctggcattgaggctgatgtttttacatataatacacttgcttatggctattgtagatgtggaaggattgatgatgggttgattctattcagagaaatgttgcaaaacaaacctaaacccacaacaatcacatataacatcatactggatgggttatttcgtgctgggagaacatttgctgcaaagaaaatgttcgttgagatgatcgaaacgggaataacagtgagcatttccacatacagtataatacttggaggactttgtaggaataattgctctgacgaagcgatcaccctatttcagaaattaggagcaatgaatgtgaagtttgatattaaaatactcaataccatgatcaatgccatgttcaaggttcggagaagagaagaagctaacggtttgtttgctgcaatatcagccagtgggatggtacctaatacttctacctacagcgtaatgataggaaatcttctaaaagaaggatcagtggaagaagctgaaaatatgttctcattaatggagaagagtggttgtgctccagactctcgtcttataaataatatcatcagaatattgttggaaaacggtgacatcgtcaaggctggaaattatatgtctaaagttgatggcaagagcatctcacttgaagcttcaactacttcgttgttgatgtgtctcttttcaagtaaagggaaatatcgggaacaaatcagtttgctccctgtaaattaccaatttttcaatggagtcggt

SEQ ID NO: 1726 - DNA, 2472 bp, Triticum aestivum
  source 1..2472: mol_type = genomic DNA
atgtcccgcctccgccactccacctccaccgcgccgatgccccacctccgccttctccgctgccgctcctcctccatctccaccttgccgccgtcacgctcatggtctcccgtcaccgcctttgccgcggccacagagcgcgtcagcgctgggacgctcagtccggaagacgcacaccgcctgttcgacgaattgcttcggcaggccactccggtccccgcgcgctccctgaacggcttcctcacggccctctcccgtgcgccgggcaccggcgcctgcggagacggccccgccctcgccctcgccctcttcaaccgcacccgccgagaagaggccggctcccgggtggtgccgtccacaatcttcacctacggcatcctcatgaactgctgccgccgcacgcgtcgtccggaacttgggctcgccttctttgggcgcgtcctcaggatgggcctgaggacaaacgtggtcgtcgccaccacggtcctccagtgcctctgcggcgccaaacggacagatgaggccgtggacatcctgctacatcggatgtccgagctcgggtgcgtgcctgatgccttctcatactccattgttctgaagagcttatgcgatgatggcaggagccagcgggcactcgacctgctccacatgtgggagaaagaacgaggtctctgctcccccaacgtagtgatgtataacacggtcatccatgacttctttaaggaaggtgaagtaagcaaggcatgcagtctattccatgaaatggagcagaaaggggttgtgcctaatgtggtgacatatagcttgaccattgacgcgctgtgcaaggccagagctatggacaaagcacagttgttcctccggcagatgattgataaaggtgttcgaccgaacaatgtgacatataatgtcatgatccatggatattgcactctgggacagtggaaggaagcgcgtaaaatgttcagagaaatgacaagacagggtctcataccagatattgttacttggacctcgttcatggcctctctttgtaagcatggaagaaccaaagaagctgccgaattctttgattccatgactgccaagggccacaagcctgatttggtcatgtatcatgttctgctccatgggtatgcaaccaaaggatgctttgctgatatgattaatctctttaattcaatggcaaccaagggtattgtacccgatcgtcaggttttcaacattttaattgatgcacatgctaaacatggaatgatggatgaagctatgcacatatttactggaatgcagggacaaggagtgtgtccagatgtatggacctattcaactctaatatctgcactttgcagaatgggtaggctggctgatgccatggataacttcagtcagatgattggtaagggagtacaaccgaacacagttgtttatcactccctaattcagggtttctctacacatggtgatttgaggaaagcaaaggagttggtttatgaaatgacaaacaaaggtattccttgtccaaacattgcattcttcagttctgtaatggacggtatatgcaaagaaggaagggttatggatgcacatgatatcttccacttggttacagacataggtctgaaacctaacatcattacgtttaatacgctgattgatggacattgcttagtcggtgagatggagaaagcatttggagtacttgattccatggtatcagctggcattgaggctgatgtttttacatataatacacttgcttatggctattgtagatgtggaaggattgatgatgggttgattctattcagagaaatgttgcaaaacaaacctaaacccacaacaatcacatataacatcatactggatgggttatttcgtgctgggagaacatttgctgcaaagaaaatgttcgttgagatgatcgaaacgggaataacagtgagcatttccacatacagtataatacttggaggactttgtaggaataattgctctgacgaagcgatcaccctatttcagaaattaggagcaatgaatgtgaagtttgatattaaaatactcaataccatgatcaatgccatgttcaaggttcggagaagagaagaagctaacggtttgtttgctgcaatatcagccagtgggatggtacctaatacttctacctacagcgtaatgataggaaatcttctaaaagaaggatcagtggaagaagctgaaaatatgttctcattaatggagaagagtggttgtgctccagactctcgtcttataaataatatcatcagaatattgttggaaaacggtgacatcgtcaaggctggaaattatatgtctaaagttgatggcaagagcatctcacttgaagcttcaactacttcgttgttgatgtgtctcttttcaagtaaagggaaatatcgggaacaaatcagtttgctccctgtaaattaccaatttttcaatggagtcggt

SEQ ID NO: 1727 - DNA, 2472 bp, Triticum aestivum; identical to SEQ ID NO: 1726
  source 1..2472: mol_type = genomic DNA

SEQ ID NO: 1728 - DNA, 2508 bp, Triticum aestivum
  source 1..2508: mol_type = genomic DNA
atgtcccgcctccgccactccacctccaccgcgccgatgtcccgcctccgccactccacctccaccgcgccgatgccccacctccgccttctccgctgccgctcctcctccatctccaccttgccgccgtcacgctcatggtctcccgtcaccgcctttgccgcggccacagagcgcgtcagcgctgggacgctcagtccggaagacgcacaccgcctgttcgacgaattgcttcggcaggccactccggtccccgcgcgctccctgaacggcttcctcacggccctctcccgtgcgccgggcaccggcgcctgcggagacggccccgccctcgccctcgccctcttcaaccgcacccgccgagaagaggccggctcccgggtggtgccgtccacaatcttcacctacggcatcctcatgaactgctgccgccgcacgcgtcgtccggaacttgggctcgccttctttgggcgcgtcctcaggatgggcctgaggacaaacgtggtcgtcgccaccacggtcctccagtgcctctgcggcgccaaacggacagatgaggccgtggacatcctgctacatcggatgtccgagctcgggtgcgtgcctgatgccttctcatactccattgttctgaagagcttatgcgatgatggcaggagccagcgggcactcgacctgctccacatgtgggagaaagaacgaggtctctgctcccccaacgtagtgatgtataacacggtcatccacgacttctttaaggaaggtgaagtaagcaaggcatgcagtctattccatgaaatggagcagaaaggggttgtgcctaatgtggtgacatatagcttgaccattgacgcgctgtgcaaggccagagctatggacaaagcacagttgttcctccggcagatgattgataaaggtgttcgaccgaacaatgtgacatataatgtcatgatccatggatattgcactctgggacagtggaaggaagcacgtaaaatgttcagagaaatgacaagacagggtctcataccagatattgttacttggacctcgttcatggcctctctttgtaagcatggaagaaccaaagaagctgccgaattctttgattccatgactgccaagggccacaagcctgatttggtcatgtatcatgttctgctccatgggtatgcaaccaaaggatgctttgctgatatgattaatctctttaattcaatggcaaccaagggtattgtacccgatcgtcaggttttcaacattttaattgatgcacatgctaaacatggaatgatggatgaagctatgcacatatttactggaatgcagggacaaggagtgtgtccagatgtatggacctattcaactctaatatctgcactttgcagaatgggtaggctggctgatgccatggataacttcagtcagatgattggtaagggagtacaaccgaacacagttgtttatcactccctaattcagggtttctctacacatggtgatttgaggaaagcaaaggagttggtttatgaaatgacaaacaaaggtattccttgtccaaacattgcattcttcagttctgtaatggacggtatatgcaaagaaggaagggttatggatgcacatgatatcttccacttggttacagacataggtctgaaacctaacatcattacgtttaatacgctgattgatggacattgcttagtcggtgagatggagaaagcatttggagtacttgattccatggtatcagctggcattgaggctgatgtttttacatataatacacttgcttatggctattgtagatgtggaaggattgatgatgggttgattctattcagagaaatgttgcaaaacaaacctaaacccacaacaatcacatataacatcatactggatgggttatttcgtgctgggagaacatttgctgcaaagaaaatgttcgttgagatgatcgaaacgggaataacagtgagcatttccacatacagtataatacttggaggactttgtaggaataattgctctgacgaagcgatcaccctatttcagaaattaggagcaatgaatgtgaagtttgatattaaaatactcaataccatgatcaatgccatgttcaaggttcggagaagagaagaagctaacggtttgtttgctgcaatatcagccagtgggatggtacctaatacttctacctacagcgtaatgataggaaatcttctaaaagaaggatcagtggaagaagctgaaaatatgttctcattaatggagaagagtggttgtgctccagactctcgtcttataaataatatcatcagaatattgttggaaaacggtgacatcgtcaaggctggaaattatatgtctaaagttgatggcaagagcatctcacttgaagcttcaactacttcgttgttgatgtgtctcttttcaagtaaagggaaatatcgggaacaaatcagtttgctccctgtaaattaccaatttttcaatggagtcggt

SEQ ID NO: 1729 - DNA, 2472 bp, Triticum aestivum; identical to SEQ ID NO: 1725
  source 1..2472: mol_type = genomic DNA

SEQ ID NO: 1730 - DNA, 2508 bp, Triticum aestivum
  source 1..2508: mol_type = genomic DNA
atgtcccgcctccgccactccacctccaccgcgccgatgtcccgcctccgccactccacctccaccgcgccgatgccccacctccgccttctccgctgccgctcctcctccatctccaccttgccgccgtcacgctcatggtctcccgtcaccgcctttgccgcggccacagagcgcgtcagcgctgggacgctcagtccggaagacgcacaccgcctgttcgacgaattgcttcggcaggccactccggtccccgcgcgctccctgaacggcttcctcacggccctctcccgtgcgccgggcaccggcgcctgcggagacggccccgccctcgccctcgccctcttcaaccgcacccgccgagaagaggccggctcccgggtggtgccgtccacaatcttcacctacggcatcctcatgaactgctgccgccgcacgcgtcgtccggaacttgggctcgccttctttgggcgcgtcctcaggatgggcctgaggacaaacgtggtcgtcgccaccacggtcctccagtgcctctgcggcgccaaacggacagatgaggccgtggacatcctgctacatcggatgtccgagctcgggtgcgtgcctgatgccttctcatactccattgttctgaagagcttatgcgatgatggcaggagccagcgggcactcgacctgctccacatgtgggagaaagaacgaggtctctgctcccccaacgtagtgatgtataacacggtcatccacgacttctttaaggaaggtgaagtaagcaaggcatgcagtctattccatgaaatggagcagaaaggggttgtgcctaatgtggtgacatatagcttgaccattgacgcgctgtgcaaggccagagctatggacaaagcacagttgttcctccggcagatgattgataaaggtgttcgaccgaacaatgtgacatataatgtcatgatccatggatattgcactctgggacagtggaaggaagcacgtaaaatgttcagagaaatgacaagacagggtctcataccagatattgttacttggacctcgttcatggcctctctttgtaagcatggaagaaccaaagaagctgccgaattctttgattccatgactgccaagggccacaagcctgatttggtcatgtatcatgttctgctccatgggtatgcaaccaaaggatgctttgctgatatgattaatctctttaattcaatggcaaccaagggtattgtacccgatcgtcaggttttcaacattttaattgatgcacatgctaaacatggaatgatggatgaagctatgcacatatttactggaatgcagggacaaggagtgtgtccagatgtatggacctattcaactctaatatctgcactttgcagaatgggtaggctggctgatgccatggataacttcagtcagatgattggtaagggagtacaaccgaacacagttgtttatcactccctaattcagggtttctctacacatggtgatttgaggaaagcaaaggagttggtttatgaaatgacaaacaaaggtattccttgtccaaacattgcattcttcagttctgtaatggacggtatatgcaaagaaggaagggttatggatgcacatgatatcttccacttggttacagacataggtctgaaacctaacatcattacgtttaatacgctgattgatggacattgcttagtcggtgagatggagaaagcatttggagtacttgattccatggtatcagctggcattgaggctgatgtttttacatataatacacttgcttatggctattgtagatgtggaaggattgatgatgggttgattctattcagagaaatgttgcaaaacaaacctaaacccacaacaatcacatataacatcatactggatgggttatttcgtgctgggagaacatttgctgcaaagaaaatgttcgttgagatgatcgaaacgggaataacagtgagcatttccacatacagtataatacttggaggactttgtaggaataattgctctgacgaagcgatcaccctatttcagaaattaggagcaatgaatgtgaagtttgatattaaaatactcaataccatgatcaatgccatgttcaaggttcggagaagagaagaagctaacggtttgtttgctgcaatatcagccagtgggatggtacctaatgcttctacctacagcgtaatgataggaaatcttctaaaagaaggatcagtggaagaagctgaaaatatgttctcattaatggagaagagtggttgtgctccagactctcgtcttataaataatatcatcagaatattattggaaaacggtgacattgtcaaggctggaaattatatgtctaaagttgatggcaagagcatctcacttgaagcttcaactacttcgttgttgatgtgtctcttttcaagtaaagggaaataccgggaacaaatcagtttgctccctgtaaattaccaatttttcaatggagtcagt

SEQ ID NO: 1731 - DNA, 2364 bp, Triticum aestivum
  source 1..2364: mol_type = genomic DNA
atgcctggcttctcctccaccgcgtcaatgtcgccactgcgcctccgcctgcacgcccgccactcctcctccgcctcgcaaccctcacgcagccagggatgggatccccacgccgccttcgccgccgccacgcagcgtgcgcgctctggcagcctcaccccggcggacgcacaccacctgttcgacgaattgctgcggcaggcaaatcctgtccaggagcgccccctcaacaaccttctcgccgccatcgcccgcgcgccggcgtccagcgcctgcagagacggccctgcactcgcggttgccctcttcagtcgcatatcccaaggcgcccgccgacgtgtggcacatccaacggcttgcacctacggcatcctcatggactgctgctgccgtgcacgccgccctgatctgtcactcgccttattcggtcgtctcctcaggacgggcctgaaggcagaccaagtcgttttcagcaccctcctcaagggactctgccacgcaaagcgctcagatgaggctctgcatgtgctgctgcacaggatgcctgagctcggctgcacccccgacgtggtggtgtttaacaccgtcatccatggattcttcagggaaggccaagtaggcaaggcgtgcgatatgttccttggaatggcgcagcagggcgttgcgcctaatgtggtgacatataactcggttattgatgcactgtgcaaggccagggccatggacaaggcggagtatttccttcgtcaaatggttgataatggtgtcgtacctgataatgtgacttataatagcctcatccatggatactcctcttcaggccatcaaaaggaggtgcttagggtgctgaaagaaatgacaagtcagggtattataccagatgttgttacttgcaactcgctcatggcctacctttgcaagaacggaagaagcaaagaagctgcagaattttttgactccatggtcatgaagggcctgaaacctaatatcgtctcgtacagtactctgcttcacgggtatgccaccgaagggtgcttagttgatatgattaatctctttaattcaatgacaagagatggtattcaacctgactgtcatgttttgaacatactgattaatgcatatgctaaatctggcatgatggatgaggctatccttatgttcaaagaaatgcagaagcgaggagtgagtccagatgtagtcacctattcaaccgtaatacatggattttgcaaaatgggtaggttggacgatgctatggtaaaatttaagcagatgactgatatgggagtacgaccgaatccaattgtttaccattccctaatcaagggtttttgtacacatggggatttagtgaaagcaaaggaattggttactgaaatgaggaacaaagctatgcgtcctcctgatattaagttcttccattcaataatgcagaacctatgcacggaaggaagggtaatagaagcacgggatatcctcgacttgatggtgcacataggtatgaggcctgatgttttgatatttaatgtactgattggtggatactgcctagtctgcaagatggaggatgcctcgaaaatatttgatgatatggtatcatatggtttagaaccttgtaatattacgtatggtatacttattaatggctattgcaaaaacagaaggattgatgaggggctgattctattcaaagaaatgttgtgcaagggacttaaacctacaacttttaactataacgtcatactggatggattatttctggctggacgaactgttgctgcaaaggagaagtttaatgagatggttgaatctggagtaagtgtgtgcattgatacatgctctatagttcttggtggactttgtaaaaatagctgcagcagcgaagcgatcaccctgttccggaaattaagcacaatgaatgtgaaattagatattaaaattgtcaatatcattattggtgcattctacagggtcaagagaaaccaagaggctaaggatttgtttgctgctataacagccaatggcttggttcctaatgctgttacctacagcataatgatgacaaatcttataaaagaaggttcagtggaagaagccgacaatctttttttatcaatggagaagagcggctctactgcaaactcttggatgttaaataatattatcagaaggttactggaaagaagagagatagtcaaggctggaaattatatgtctaaagttgatgtaaagagctactcacttgaagctaaaactgtttcactgctgatctctctgttttcaagggaagggaaatatagagaccacatcaaattgctccctacaaagtatcagtttctgaaagaaccagccacagttgaa

SEQ ID NO: 1732 - DNA, 2145 bp, Triticum aestivum
  source 1..2145: mol_type = genomic DNA
atgcctggcttctcctccaccgcgtcaatgtcgccactgcgcctccgcctgcacgcccgccactcctcctccgcctcgcaaccctcacgcagccagggatgggatccccacgccgccttcgccgccgccacgcagcgtgcgcgctctggcagcctcaccccggcggacgcacaccacctgttcgacgaattgctgcggcaggcaaatcctgtccaggagcgccccctcaacaaccttctcgccgccatcgcccgcgcgccggcgtccagcgcctgcagagacggccctgcactcgcggttgccctcttcagtcgcatatcccaaggcgcccgccgacgtgtggcacatccaacggcttgcacctacggcatcctcatggactgctgctgccgtgcacgccgccctgatctgtcactcgccttattcggtcgtctcctcaggacgggcctgaaggcagaccaagtcgttttcagcaccctcctcaagggactctgccacgcaaagcgctcagatgaggctctgcatgtgctgctgcacaggatgcctgagctcggctgcacccccgacgtggtggtgtttaacaccgtcatccatggattctttagggaaggccaagtaggcaaggcgtgcgatatgttccttggaatggcgcagcagggcgttgcgcctaatgtggtgacatataactcggttattgatgcactgtgcaaggccagggccatggacaaggcggagtatttccttcgtcaaatggttgataatggtgtcgtacctgataatgtgacttataatagcctcatccatggatactcctcttcaggccatcaaaaggaggtgcttagggtgctgaaagaaatgacaagtcagggtattataccagatgttgttacttgcaactcgctcatggcctacctttgcaagaacggaagaagcaaagaagctgcagaattttttgactccatggtcatgaagggcctgaaacctaatatcgtctcgtacagtactctgcttcacgggtatgccaccgaagggtgcttagttgatatgattaatctctttaattcaatgacaagagatggtattcaacctgactgtcatgttttgaacatactgattaatgcatatgctaaatctggcatgatggatgaggctatccttatgtttaaagaaatgcagaagcgaggagtgagtccagatgtagtcacctattcaaccgtaatacatggattttgcaaaatgggtaggttggacgatgctatggtaaaatttaagcagatgactgatatgggagtacgaccgaatccaattgtttaccattccctaatcaagggtttttgtacacatggggatttagtgaaagcaaaggaattggttactgaaatgaggaacaaagctatgcgtcctcctgatattaagttcttccattcaataatgcagaacctatgcacggaaggaagggtaatagaagcacgggatatcctcgacttgatggtgcacataggtatgaggcctgatgttttgatatttaatgtactgattggtggatactgcctagtctgcaagatggaggatgcctcgaaaatatttgatgatatggtatcatatggtttagaaccttgtaatattacgtatggtatacttattaatggctattgcaaaaacagaaggattgatgaggggctgattctattcaaagaaatgttgtgcaagggacttaaacctacaacttttaactataacgtcatactggatggattatttctggctggacgaactgttgctgcaaaggagaagtttaatgagatggttgaatctggagtaagtgtgtgcattgatacatgctctatagttcttggtggactttgtaaaaatagctgcagcagcgaagcgatcaccctgttccggaaattaagcacaatgaatgtgaaattagatattaaaattgtcaatatcattattggtgcattctacagggtcaagagaaaccaagaggctaaggatttgtttgctgctataacagccaatggcttggttcctaatgctgttacctacagcataatgcccggtttaaaactgagtagtatacttaaaccgtcaatcgtaaaccggctttcattttgtctttcacagtttgtctttccaaga

SEQ ID NO: 1733 - DNA, 2439 bp, Triticum aestivum
  source 1..2439: mol_type = genomic DNA
atgtcccgcgtccgcctccacctccaccgccggctcctctcctccacctcaccgccctcacgttcctggtctccccgcgacgcctttgctgcggccgcagagcgcgtgcgtgctggtacactcagtcgagacgatgcacaccacctgttcgacaaattgtttcggcaggccaccccggtccccaaccgctccctgaacggcttccttgcctctctcgcgcgtgctacgtccaccactgcctgcatcaaagatggccccgccctcgcccttgctctcttcaaccgtgtgtgcagagaagaagccggcccgcaggtggccgcgcccaccgtttgcacctacaacatcctcatggactgctgctgccgcgctcgtcgcccagacctagggcttgccttattcgggtgtatcctcaggacgggcttgaagatagagcaaatcaccgccaacaccctcctcaagtgcctctgctatgcaaaacggacgggtgaggctgtgaacgtgctgcttcataggatgtccgagctcggatgtgtgcctgatgtctttgcatacaccacagttcttaagagcttatgtgaaggtagcaagagcctgcaggcgctcgacctgctccggacgatggcaaaagatagaggtggctgcttccctgatgtggtggcatataatacggtcatccatggctttttcaaggagggcgaaacaggcaaggcatgcaatctattccatgaaatgatccatcaaggggttgagcccgatgtggtgacgtacaacttggtcattgatgcgttgtgcaaggctagagcaatggacaaggcagaagtagtccttcagcagatggtcgataaaggtgttcaacctgatacagtgacatatacttacatgatccatggatattccatatctggacggtggaaagagactgctaaattgttcagagaaatgacaagccggggtcttataccaaatattgttacttgcaactcattcctgacctccctttgcaagcatggaagaagcaaagaagctgcagaatttttcgattccatgactgccaagggccacaaaccgaatatcgtctcataccgtattttgcttcatgggtatgctactaaaggatgcttccctgatatgattgatgtctttaattcaatggaaagcaatggtattgcagccgactgccatgttttcaacatattaattgatgcatatgctaaacgtgggatgatggatgaagctatgctgataccaagtaaaatgcaggaacgcagagtgaatcctgatatagtcacctattccagcataatagctggactttccagattgggtaggctgactgaggccatggaaaaattcaatcagatgattgccttgggagtacaaccggacaaagctgtttatcacacgctgattcagggtttttgcatagatggtgatttggctaaagctaagcagttggtttctgaaatgatgaacagaggtattcctcgtcctaacattgtgttcttcaattcagtaataaacagtatgtgcaaggaaggaagggttatggatgcacatgatatctttgagttggttatagacatgggtgagaggcctgataacattttatttaattcactgattgacggatactgcttagtcgggaagatggataaagcattaaaagtacttgatgtcatggaatcagttggtgttgagcctgatgttattacatataatacacttgttaatggctattgtagaaatggaaggatcgttgatggtttgactctgttcagagagatgccgcgtaaaagaattaaacctgacactatttcatatcgcatcataatggatgggttgtttcgttctgggagaactgtttctgcaaggcaaatgttccatgagatgatcgaaagtggaacaacagtcagcatttccacttacaatgtaatacttggaggtctttgtagaaataattgtgcagacgaagcgattgccctgttccagaaattaggttcaatgaatgtgaagttcagtattgcaatcgtcaataccatgattaatgcaatgtataaggttcaaagaaaagaagaagctaaggatttgtttgctgcaatatcagcaagtgggctggtgcataatgaatctacttacgcagtaatgataagaaatcttcttaaagatggagcggtggaagatgctaacgatatgttttcatcaatggacaagagtggtatagtccccagctcccatcttataaatgatatcatcagaatgttgctggaaagaggtgagatcgccaatgctggaaattatttgtctaaagttgatgggaagagcatctcacttgaagcttcaacgacttcattaatgttgtcccttttttcaagagaagggaaatatcgggaggacatgaaattgcttcctgcaaagtatcaatttttcgatggactttgt

SEQ ID NO: 1734 - DNA, 2442 bp, Triticum aestivum
  source 1..2442: mol_type = genomic DNA
atgtacctcatccacctccacctccaccgccgcctcttctcctccaccgcgcggccctcgcgaccctcgcgtgcctggtctccccacgccgcctttgctgcggccacggagcgcgtccgcgccgggaatttcagctgggaagacgcacacaacctgttcgacgaatcgctacggcgggccaccccggtccccgagcgctccctcgacggcttctgtgccgccctcgcccgtgggcacgcctccgaagcctgcagagatggtcccgccctcgccctcgctctcttcaaccacgtctgccgggacgaatccggcgcgcgggtggcaccacccacaatcttcacgtacggcattctcatgaactgctgctgtcgtgcgcatcgcccggacctagggctagccttcttcggtcgcctcctcaggacgggcctgaaggctgacctgatcgtcgccaacaccctccttaagtgtctctgccgcgcgaaacggacggatgaggctgtgaacgtgctgcttcataggatgtccgagctcggctgtgtgcctgatgccttctcatactccattgttctcaagagcttatgcgacaatggcatgagtcagcaggcgctcgacctgctgcatatgatggcgaaagaaggaggtggctgctcccccgacgtggtggcgtatagcacagtcatccatggcttctttaaggaaggtgaaacaggcaaggcatgcaatctgttccatgaaatgttgcagcaaggtgttgagcccaatgtgtggacatatagttcaatcattgatgcattgtgcaaggccagagcaatggacaaggcagagctagtgcttcagcagatggttaacaaaggtgttcaacccgataatgtgacatataattgcatgatccatggatattccacatctgggcggtggaaagaggctgttaaattgtttagagaaatgaaaagccggggccttataccagataattttacttgcaactccttaatgacttacctttgtaagcatggaagaagcaaagaaggtgcagaattttttgatgccatgactgccaaagggcacagagatgtcatctcctactgtgttttgcttcatgggtatgccaatgaaggatgctttgctgatatgattgatctctttaattcaatggaaagaaacggtattgctgccaactgctatgttttcaacatattagttaatggatatgctaaacgtggaatgacggatgaagctatgctgatatttacagaaatgtgggaaaaaggagtgagtcccaatgtagtcacatattccactgtaatagctgcactttccaggatgggtaggttgactgattctatggacaaatttaatcagatgattgccatgggaattcagccaaacacagctgtttatcactccctaattcagggttgtcttatgcatggtggcttggttaaagctaaggagctgatgtttgaaatgatgaacaaaggtattccttgtcctaacattgttttcttcagttcagtaataaacagtctgtgcaaagaaggaagggttatggatgcacatgatgtctttgacttggctataggcataggtgagaggcctaatgtcattatatttaattcactgattgacggatattgcttagttgggaagatggataaagcattcaaaatacttcatgtcatggaatcagttggtgttgagtctgatgttgttacttatagtgcacttcttgatggctattttaaaaacagaaggattgatggtgctttgactttgtttagagaaatgccgcgcaagagaattaaacctgacactgttacatataacatcatgttggatgggttgtttcgtgctgggagaactgtcgctgcaatggaaatgttccatgagatgactgaaagtggagcaacagtgcgcatttccacatacaatataatacttggaggtctttgtagaaatagttgtgtagatgaagcgattgcactgttccagaaattgcaagcaatgaatgtgaagttcattattgaaatattcaataccatgattgatgcaatgtacaaggttcaaagaaaagaagaagctaaggatttgtttgctgcaataccagctagtgggttggtgcccaatgaatctacttatgcagtaatgataagaaatcttctaaaagacggagcagtggaagatgctgacaatatgttttcatcaatggacaacagtggtatcgttcccagttcccgtcttataaatgatatcatcagaatgttgttggaaaaaggtgagatagccaaggctggaaattatttgtctaaagttgatgggaagagtatctcacttgaagcgtcaactacctcattgatgttgtctctcttttcaaggaaagggaaacatctggaggatattaagttgctcccagcaaactatcaatttttcgatggatttggt

SEQ ID NO: 1735 - DNA, 2442 bp, Triticum aestivum
  source 1..2442: mol_type = genomic DNA
atgtctctcatccacctccacctccaccgccgcctcttctcctccaccgcgcggccctcgcgaccctcgcgtgcctggtctccccacgccgcctttgctgcggccacggagcgcgtccgcgccgggaatttcagctgggaagacgcacacaacctgttcgacgaattgctacggcgggccaccccggtccccaagcgctccctcgacggcttccttgccgccctcgcccgtgcgcacgcctccgaagcctgcagagatggtcccgccctcgccctcgctctcttcaacctcgtctgccgggatgaatccggcgcgcgggtggcaccgcccacaatcttcacgtacggcattctcatgaactgctgctgtcgtgcgcattgcccggacctagggctagccttcttcgggcgcctcctcaggacgggcctgaaggctgacctgatagtcgccaacaccctccttaagtgtctctgccacgcgaaacggacggatgaggctgtgaacgtgctgcttcataggatgtccaagctcggctgtgtgcctgataccttctcatacaacattgttctcaagagcttatgcgacaatggcatgagccagcaggcgctcgacctgctccatatgatggcgaaagaaggaggtggctgcccccctgacgtggtggcgtatagcacagtcatccatggcttctttaaggaaggtgaaacaggcaaggcatgcaatctgttccatgaaatgatgcatcaaggtgttgagcccaatgtgtggacatatagttcaatcattgatgcattgtgcaaggccagagcaatggacaagacagagctagtgcttcagcagatggttaacaaaggtgttcaacccgataatgtgacatataattgcatgatccatggatattccacatctgggaggtggaaagaggctgttaaattgtttagagaaatgaaaagccggggccttataccagatatttctacttgcaactccttaatgacttacctttgtaagcatggaagaagcaaagaaggtgcagaattttttgatgccatgactgccaaagggcacagagatgtcatctcctactgtattttgcttcatgggtatgccaatgaaggatgctttgctgatatgattgatctctttaattcaatggaaagaaacggtattgctgccaactgctatgttttcaacatattaattaatggatatgctaaatgtggaatgacggatgaagctatgctgatatttacagaaatgtgggaaaaaggagtgagtcccaatgtagtcacatattccactgtaatagctgcactttccaggatgggtaggttgactgattctatggacaaatttaatcagatgattgccatgggaattcagccaaacacagctgtttatcactccctaattcagggttgtcttatgcatggtggcttggttaaagctaaggagctgatgtttgatatgatgaacaaaggtattcctcgtcctaacattgttttcttcagttcagtaataaacagtctgtgcaaagaaggaagggttatggatgcacatgctgtctttgacttggctataggcataggtgagaggcctgatgtcattacatttaattcactgattgacggatattgcttagttgggaagatggatacagcattcaaaatacttgatgtcatggaattagttggtgttgagcctgatgttgttacttatagtgcacttcttgatggctattttaaaaacagaaggattgatgatgctttgactttttttagagaaatgccatgtaagagaattaaacctaacactgttacatatggcatcatgttgggtgggttgtttcgtgctgggagaactgttgctgcaatgaaaatgttccatgagatgattgaaagtggagcaacagtgcgcatttccacatacaatataatacttggaggtctttgtcaaactaattgtgtagacgaagcgattgcactgttccagaaattacgagcaatgaatgtgaagttcaatattgaaacactcaataccatgattaatgcaatgtacaaggttcaaagaaaagaagaagctaaggatttgtttgctgcaataccagctagtgggttggtgcccaatgaatctacttatgcagtaatgataagaaatcttctaaaagacggagcagtggaagatgctgacaatatgttttcatcaatggacaacagtggtatcgttcccagttcccgtcttataaatgatatcatcagaatgttgttggaaaaaggtgagattgctaaggctggaaattatttgtctaaagttgatgggaagagtatctcacttgaagcgtcaactacctcattgatgttgtctctcttttcaaggaaagggaaacatctggaggatattaagttgctcccagcaaagtatcaatttttcgatggatttggt

SEQ ID NO: 1736 - DNA, 2442 bp, Triticum aestivum
  source 1..2442: mol_type = genomic DNA
atgtctctcatccacctccacctccaccgccgcctcttctcctccaccgcgcggccctcgcgaccctcgcgtgcctggtctccccacgccgcctttgctgcggccacggagcgcgtccgcgccgggaatttcagctgggaagacgcacacaacctgttcgacgaattgctacggcgggccaccccggtccccaagcgctccctcgacggcttccttgccgccctcgcccgtgcgcacgcctccgaagcctgcagagatggtcccgccctcgccctcgctctcttcaacctcgtctgccgggatgaatccggcgcgcgggtggcaccgcccacaatcttctcgtacggcattctcatgaactgctgctgtcgtgcgcattgcccggacctagggctagccttcttcgggcgcctcctcaggacgggcctgaaggctgacctgatagtcgccaacaccctccttaagtgtctctgccacgcgaaacggacggatgaggctgtgaacgtgctgcttcataggatgtccaagctcggctgtgtgcctgataccttctcatacaacattgttctcaagagcttatgcgacaatggcatgagccagcaggcgctcgacctgctccatatgatggcgaaagaaggaggtggctgcccccctgacgtggtggcgtatagcacagtcatccatggcttctttaaggaaggtgaaacaggcaaggcatgcaatctgttccatgaaatgatgcatcaaggtgttgagcccaatgtgtggacatatagttcaatcattgatgcattgtgcaaggccagagcaatggacaagacagagctagtgcttcagcagatggttaacaaaggtgttcaacccgataatgtgacatataattgcatgatccatggatattccacatctgggaggtggaaagaggctgttaaattgtttagagaaatgaaaagccggggccttataccagatatttctacttgcaactccttaatgacttacctttgtaagcatggaagaagcaaagaaggtgcagaattttttgatgccatgactgccaaagggcacagagatgtcatctcctactgtattttgcttcatgggtatgccaatgaaggatgctttgctgatatgattgatctctttaattcaatggaaagaaacggtattgctgccaactgctatgttttcaacatattaattaatggatatgctaaatgtggaatgacggatgaagctatgctgatatttacagaaatgtgggaaaaaggagtgagtcccaatgtagtcacatattccactgtaatagctgcactttccaggatgggtaagttgactgattctatggacaaatttaatcagatgattgccatgggaattcagccaaacacagctgtttatcactccctaattcagggttgtcttatgcatggtggcttggttaaagctaaggagctgatgtttgatatgatgaacaaaggtattcctcgtcctaacattgttttcttcagttcagtaataaacagtctgtgcaaagaaggaagggttatggatgcacatgctgtctttgacttggctataggcataggtgagaggcctgatgtcattacatttaattcactgattgacggatattgcttagttgggaagatggatacagcattcaaaatacttgatgtcatggaatcagttggtgttgagcctgatgttgttacttatagtgcacttcttgatggctattttaaaaacagaaggattgatgatgctttgactttttttagagaaatgccatgtaagagaattaaacctaacactgttacatatggcatcatgttgggtgggttgtttcgtgctgggagaactgttgctgcaatgaaaatgttccatgagatgattgaaagtggagcaacagtgcgcatttccacatacaatataatacttggaggtctttgtcaaactaattgtgtagacgaagcgattgcactgttccagaaattacgagcaatgaatgtgaagttcaatattgaaacactcaataccatgattaatgcaatgtacaaggttcaaagaaaagaagaagctaaggatttgtttgctgcaataccagctagtgggttggtgcccaatgaatctacttatgcagtaatgataagaaatcttctaaaagacggagcagtggaagatgctgacaatatgttttcatcaatggacaacagtggtatcgttcccagttcccgtcttataaatgatatcatcagaatgttgttggaaaaaggtgagatagctaaggctggaaattatttgtctaaagttgatgggaagagtatctcacttgaagcgtcaactacctcattgatgttgtctctcttttcaaggaaagggaaacatctggaggatattaagttgctcccagcaaagtatcaatttttcgatggatttggt

SEQ ID NO: 1737 - DNA, 2442 bp, Triticum aestivum; identical to SEQ ID NO: 1735
  source 1..2442: mol_type = genomic DNA

SEQ ID NO: 1738 - DNA, 2442 bp, Triticum aestivum; identical to SEQ ID NO: 1735
  source 1..2442: mol_type = genomic DNA

SEQ ID NO: 1739 - DNA, 2442 bp, Triticum aestivum; identical to SEQ ID NO: 1735
  source 1..2442: mol_type = genomic DNA

SEQ ID NO: 1740 - DNA, 2442 bp, Triticum aestivum; identical to SEQ ID NO: 1736
  source 1..2442: mol_type = genomic DNA

SEQ ID NO: 1741 - DNA, 2316 bp, Triticum aestivum
  source 1..2316: mol_type = genomic DNA
atgccgaccacccgcctgtcctccgtctccgcctcctccttcaaggcttcttcacgaaaaccacgagcccccctcgccgccttggctgctgccacggagcgtgtgcgcgccggaacactaagccaggaggacgcgcaccacctgttcgacaaattgctaggccaagccaccgccgtcccggaacgcgggctgaacaactttcttgccgcactagcccgtgcatcgccctcggctacctgcagcgatggccccggccttgctgtcaccctcttcaaccgcatgtcccttggcgctggtgcacgggtggcgtcgcccacactctgtacctattccatcctcatggactgctgctgccgtgcaggccgcccagacttggtggtcacctttttcggccgcctcctcaggttggggctgcgcttgaatgtcgtctccttcaacaacctcctcaaggggctttgccaggccaagcgctcaaatgaggcattggatctgctgctccaccggatgcccgaactggaccgtgcgcctgatgtcttctcgttcaacatagtaatcaatggctgctttagagaaggtgaagtagacaaagcatgcaatctcttccatgagatgccccaactgggagttcaacctgatgtggtgacctacaactcaattatcatcgcactaagcagggccggagcaatgggtaaggcagaagtggtccttcggcaaatggttgataaaggcattggacccgatgtcatgacatatagcagtctgatccatggatattctacttcgggtcagtggaaggcagcagttagggtattcaaagagatggtaagtgttggtgttcgaccaaatgctgtcacgttgaactcatttatggattcactttgcaagcatagaaggacaaaggaagctagagatatttttgactccatggctgcaaagggccacaaacctaatattgtctcctactctactatgcttaatgggtatgcgaaacaaggatgcttcgatgatatgactggtctcttcaattccatggtacagaacggtattgtacctaacaaccatgttttcaacatactgatcagagcatattctacacgtggactgatggatgaggctatgcacatgttcgaagtaatgaagcaacaaggagtaaacccagatgtagttgactatctagtagtaatagattccctttgcaaaatgggcaggatggatgctgctatggacaaatttaatcagatggtcaatcaaggagtttcacctgatataggcatttaccaatgcctggttctgggttcttgctctaatggtgattttgtgaaagccaaggaattgatttctgaagcagttaatcgaggtctgtgttataacagtgtgttcttctatcctgtaataaacaacctgagcaaagaaggaaatgtaaaggatgcacaggatatgtttgacttcattgtaggtattggtcatcagcctgatgttattatgtacaattcactgatggatggatattgccttgttggcaaggtggaggaagcactgacagtgcttgacgctatgaagtccgctgacctccaacctgatgctattacatatgttatacttcttaatggctactgtaaaattggaaggatcgacgatggattgagtcttttcagggaaatgtcactcagcggggttaagcccacgactattatgtacaacattgcacttgatgggctgtttcgctctaggagaacagtttctgcaaaggaaaaattccatacgattattgaaagtggcataccagtggacgttggcacatacaccatagttcttagtggactttgcaaaaataattgcactgatgaagcaatagagctgttcaacaaattacgtgctatgaacatgaagattaatgtcataatactcaataccatgatttctgcaatgtttaaaactaggagaattgaagaagccaaggatttgtttgctactataccagccattgggttggtgccttctgttgtgacctacactgtaatgatgacgaatttcataaaagaagggttgctggcagaggctgatgatatgtttttagcaatggagaaggctggctgtgctcctgactgcaggctgctaaatcatgtagtcagggtgttgctggaaaaaggtgcagttgtaaaggctgcaacttatcttgctaaacttgatgcgaaagagctgtcacttgaagcttcaacggtttcgttaatagtatctctcttctcaaggagaggcaaattaagggagcacgtaaaattgcttccggtaaagtaccagcctcctgagatgttgggc

SEQ ID NO: 1742 - DNA, 1317 bp, Triticum aestivum
  source 1..1317: mol_type = genomic DNA
atgattaatctctttaattcaatggaaggcaatggtattgtagctgactgcaatgttttcaacatattaattgatgcatatgctaaatgtggaatgatgcatgaagctatgctcatatttaccaaaatgcgggaacaaggagtgagtccgaatgtatgcacctatgcaactgtaatagctgcactttgcagaatgggtaggctgtctgatgcaatgggcaaattaaatgagatgattgctacgggattacaaccggacgtggctatttatacatccctaattcagggcttctgtacacatggtgatttggggaaagtgaaggagctggtttctgaaatgatgaacaaaggtatgcctcgtccaaacattgtgttcttcagctcagtaataaacagtctatgcaaagaaggaagagttacagatgtacacagtatcttcgacttggctataaacattggtgagaggcctgacgttattacatttacttcactgattgacggatattgtttagttggcaagatggataaagcattcaaagtacttgatgacatggtatcagctggcattgagcctgatgtttatacatatactacccttcttgatggctattctagaaatggaaggattgatgatgggttgacactattcagcgaaatgatgcataaaaaaattaaacctacaactgctacatatggcaccttactaaatgggttgtttcgtgcttggagaactgcttctgcgaagaaaatgatccatgagatgattgaaagtggaacaacagtgagcctttcaatatacgctataattcttgaaggacttcgtagaaataattgcactgatgaagcaatcacgctgttccagaaagtacgtgcaatgaatataaaattggatgttgcaatactcaataccatgatcaatgcaatgtttaaggttcaaagaagagaagaagctaatgatttgtttgcttcaatatcggccagtggattggtacctaatgcttctacctaccgcacaatgataacaaatcttctaaaagaaggattagtggaagaagctgaaaacatgctctcatcaatggagaagagctgttgtgctccggactctcgtcttattaatgataccatcagaatattattggaacaaggtgaggtcgtcaaggctggaaattatatgtctagagttgatggcaagagcatctcacttgaagcttcaactacttcgctgctgatacgtctcttttcaagggaaggaaaatatagggagaaaataaaattgctccctgtaaagtatcaattttttggtggagctacagttgag

SEQ ID NO: 1743 - DNA, 1317 bp, Triticum aestivum; identical to SEQ ID NO: 1742
  source 1..1317: mol_type = genomic DNA

SEQ ID NO: 1744 - DNA, 2478 bp, Triticum aestivum
  source 1..2478: mol_type = genomic DNA
atgagaaataaaaaaaaatcacatgaggaggccattttacccgcttccgatttgttacagcaaagactcctcaccattccaccagcgcgaacacgaaggccgtgcccgtcccatgcctcgcctctaccccaccacgcccatgctccgcctcctctcctccgccgccgccgcctctcctcctcctccacctcgtcgccttcacgccgctgggacccccgagccgcctttgccgcggccacggagcgcgtccgcgccgggacgctcagccctgaagacgcacaccacctgttcgacgaattgctactgcaggccaacccggtcccctaccgctccctcaacggcttccttgccgcgctcgcccgtgctccgtcctccgctgctctcagagatggaccctcccttgctctcgccctcttcaaccgcgtctgccgagaagaagcaggaccgcgggtggcgccgcccacagtctgcacctacagcatcctcatggacagctgctgccgtgcatgccgcccgaacctaggccttgctttcttcggccgcttcctcaggacgggcctcaaggcagaccagatcgtcgccagcaacctcctcaagtgcctctgccacgcaaaacggacggatgaggctgtcaacatgctgcttcataggatgtccgagttcggatgtgtgcctaatgtcatctcatactctatagtacttaagagcttatgtgacgatagcaggagccagcaagcgctcgacttgctccagatggtgaggaaagaaggaggtgcctgctccttcaatgtggtggcatatagcacggtcatccacggcttctttaaggaaggggaagtaagcaaggcatgcgatctgttccatgaaatgatgcagcaagggattgtgcctaatgtggtgacatatagctcgattattgatgccttgtgcaaggtcagggcaatggacaaggcaaagctggtccttcagcagatggttgataatggtgttcgaccaaatatgtatacatggaactcattcatgtactccctttgcaagaatggaagaagcaaagaagctgcagaattttttgactccatgacctccaagggcctcaaacctaatatcatcgtgtactctactcttcttcacgggtatgctaccgaaggatgcttagctgatatgattaatctctttaattcaatggaaggcaatggtattgtagctgactgcaatgttttcaacatattaattgatgcatatgctaaatgtggaatgatgcatgaagctatgctcatatttaccaaaatgcgggaacaaggagtgagtccgaatgtatgcacctatgcaactgtaatagctgcactttgcagaatgggtaggctgtctgatgcaatgggcaaattaaataagatgattgctacgggattacaactggacgtggctatttatacatccctaattcagggcttctgtacacatggtgatttggggaaagtgaaggaactggtttctgaaatgatgaacaaaggtatgcctcgtccaaacattgtgttcttcagctcagtaataaacagtctatgcaaacaaggaagagttacagatgcacacagtatcttcgacttggctataaacattggtgagaggcctcacgtcattacatttacttcactgattgacggatattgtttagtttgcaagatggataaagcattcaaagtacttgatgccatggtatcggctggcatcgagcctgatgtttatacatatactacccttcttgatggctattctagaaatggaaggattgatgatgggttgacactattcagtgaaatgatgcataacaaaactaaacctacaactgctacacatggcaccttactaaatgggttgtttcgtgctgggagaactgcttctgcgaagaaaatgatccatgagatgattgaaagtggaacaacagtgagcctttcaatatacgctataattcttgaaggactttgtagaaataattgcgccgatgaagcaatcacgctgttccagaaagtacgtgcaatgaatataaaattggatgttgcaatactcaataccatgatcaatgcaatgtttaaggttcaaagaagagaagaagctaatgatttgtttgcttcaatatcggccagtggattggtacctaatgcttctacctaccgcacaatgataacaaatcttctaaaagaaggattagtggaagaagctgaaaacatgctctcatcaatggagaagagctgttgtgctccggactctcgtcttattaatgatatcatcagaatattattggaacaaggtgaggtcgtcaaggctggaaattatatgtctagagttgatggcaagagcatctcacttgaagcttcaactacttcgctgctgatacgtctcttttcaagggaaggcaaatatagggagaaaataaaattgctccctgtaaagtatcaattttttggtggagctacagttgag

SEQ ID NO: 1745 - DNA, 1317 bp, Triticum aestivum; identical to SEQ ID NO: 1742
  source 1..1317: mol_type = genomic DNA

SEQ ID NO: 1746 - DNA, 1317 bp, Triticum aestivum
  source 1..1317: mol_type = genomic DNA
atgattaatctctttaattcaatggaaggcaatggtattgtagctgactgcaatgttttcaacatattaattgatgcatatgctaaatgtggaatgatgcatgaagctatgctcatatttaccaaaatgcgggaacaaggagtgagtctgaatgtatgcacctatgcaactgtaatagctgcactttgcagaatgggtaggctgtctgatgcaatgggcaaattaaatgagatgattgctacgggattacaaccggacgtggctatttatacatccctaattcagggcttctgtacacatggtgatttggggaaagtgaaggagctggtttctgaaatgatgaacaaaggtatgcctcgtccaaacattgtgttcttcagctcagtaataaacagtctatgcaaagaaggaagagttacagatgcacacagtatcttcgacttggctataaacattggtgagaggcctgacgttattacatttacttcactgattgacggatattgtttagttggcaagatggataaagcattcaaagtacttgatgccatggtatcagctggcattgagcctgatgtttatacatatactacccttcttgatggctattctagaaatggaaggattgatgatgggttgacactattcagcgaaatgatgcataaaaaaattaaacctacaactgctacatacggcaccttactaaatgggttgtttcgtgctgggagaactgcttctgcgaagaaaatgatccatgagatgattgaaagtggaacaacagtgagcctttcaatatacgctataattcttgaaggacttcgtagaaataattgcactgatgaagcaatcacgctgttccagaaagtacgtgcaatgaatataaaattggatgttgcaatactcaataccatgatcaatgcaatgtttaaggttcaaagaagagaagaagctaatgatttgtttgcttcaatatcggccagtggattggtacctaatgcttctacctaccgcacaatgataacaaatcttctaaaagaaggattagtggaagaagctgaaaacatgctctcatcaatggagaagagctgttgtgctccggactctcgtcttattaatgatatcatcagaatattattggaacaaggtgaggtcgtcaaggctggaaattatatgtctagagttgatggcaagagcatctcacttgaagcttcaactacttcgctgctgatacgtctcttttcaagggaaggaaaatatagggagaaaataaaattgctccctgtaaagtatcaattttttggtggagctacagttgag

SEQ ID NO: 1747 - DNA, 2478 bp, Triticum aestivum; identical to SEQ ID NO: 1744
  source 1..2478: mol_type = genomic DNA

SEQ ID NO: 1748 - DNA, 1992 bp, Triticum aestivum
  source 1..1992: mol_type = genomic DNA
atggacagctgctgccgtgcatgccgcccgaacctaggccttgctttcttcggccgcttcctcaggacgggcctcaaggcagaccagatcgtcgccagcaacctcctcaagtgcctctgccacgcaaaacggacggatgaggctgtcaacatgctgcttcataggatgtccgagttcggatgtgtgcctaatgtcatctcatactctatagtacttaagagcttatgtgacgatagcaggagccagcaagcgctcgacttgctccagatggtgaggaaagaaggaggtgcctgctccttcaatgtggtggcatatagcacggtcatccacggcttctttaaggaaggggaagtaagcaaggcatgcgatctgttccatgaaatgatgcagcaagggattgtgcctaatgtggtgacatatagctcgattattgatgccttgtgcaaggtcagggcaatggacaaggcaaagctggtccttcagcagatggttgataatggtgttcgaccaaatatgtatacatggaactcattcatgtactccctttgcaagaatggaagaagcaaagaagctgcagaattttttgactccatgacctccaagggcctcaaacctaatatcatcgtgtactctactcttcttcacgggtatgctaccgaaggatgcttagctgatatgattaatctctttaattcaatggaaggcaatggtattgtagctgactgcaatgttttcaacatattaattgatgcatatgctaaatgtggaatgatgcatgaagctatgctcatatttaccaaaatgcgggaacaaggagtgagtccgaatgtatgcacctatgcaactgtaatagctgcactttgcagaatgggtaggctgtctgatgcaatgggcaaattaaataagatgattgctacgggattacaaccggacgtggctatttatacatccctaattcagggcttctgtacacatggtgatttggggaaagtgaaggaactggtttctgaaatgatgaacaaaggtatgcctcgtccaaacattgtgttcttcagctcagtaataaacagtctatgcaaagaaggaagagttacagatgcacacagtatcttcgacttggctataaacattggtgagaggcctgacgtcattacatttacttcactgattgacggatattgtttagttggcaagatggataaagcattcaaagtacttgatgccatggtatcggctggcatcgagcctgatgtttatacatatactacccttcttgatggctattctagaaatggaaggattgatgatgggttgacactattcagcgaaatgatgcataacaaaattaaacctacaactgctacacatggcaccttactaaatgggttgtttcgtgctgggagaactgcttctgcgaagaaaatgatccatgagatgattgaaagtggaacaacagtgagcctttcaatatacgctataattcttgaaggactttgtagaaataattgcgccgatgaagcaatcacgctgttccagaaagtacgtgcaatgaatataaaattggatgttgcaatactcaataccatgatcaatgcaatgtttaaggttcaaagaagagaagaagctaatgatttgtttgcttcaatatcggccagtggattggtacctaatgcttctacctaccgcacaatgataacaaatcttctaaaagaaggattagtggaagaagctgaaaacatgctctcatcaatggagaagagctgttgtgctccggactctcgtcttattaatgatatcatcagaatattattggaacaaggtgaggtcgtcaaggctggaaattatatgtctagagttgatggcaagagcatctcacttgaagcttcaactacttcgctgctgatacgtctcttttcaagggaaggcaaatatagggagaaaataaaattgctccctgtaaagtatccattttttggtggagctacagttgag

SEQ ID NO: 1749 - DNA, 1317 bp, Triticum aestivum; identical to SEQ ID NO: 1742
  source 1..1317: mol_type = genomic DNA

SEQ ID NO: 1750 - DNA, 1317 bp, Triticum aestivum; identical to SEQ ID NO: 1742
  source 1..1317: mol_type = genomic DNA

SEQ ID NO: 1751 - DNA, 1992 bp, Triticum aestivum; identical to SEQ ID NO: 1748
  source 1..1992: mol_type = genomic DNA

SEQ ID NO: 1752 - DNA, 1317 bp, Triticum aestivum; identical to SEQ ID NO: 1742
  source 1..1317: mol_type = genomic DNA

SEQ ID NO: 1753 - DNA, 1992 bp, Triticum aestivum; identical to SEQ ID NO: 1748
  source 1..1992: mol_type = genomic DNA

SEQ ID NO: 1754 - DNA, 1992 bp, Triticum aestivum; identical to SEQ ID NO: 1748
  source 1..1992: mol_type = genomic DNA

SEQ ID NO: 1755 - DNA, 2460 bp, Triticum aestivum
  source 1..2460: mol_type = genomic DNA
atgtcccgcctccgccactccacctccaccgcgccgatgttccacctccgcctcctccgctgccgcttctcctccatctccaccttgccgccgtcacgctcatggtctccccatgcagcctttgccgcggccacagagcgcgtcatcgctgggacgctcagcccggaggacgcacaccgcctgttcgacgaattgctacggcaggccactccggtccccgcgcgctccctgaacggcttcctcacggccctctcccgtgcgccggacaccggcgcctgcagagacggccccgccctcttcaaccgcacccgccgagaagaggccggctcccgggtggtgtcgtccacaatcttcacctacggcatcctcatgaactgctgcggccgcacgcgtcgtccggaacttgggcttgccttctttgggcgcgtcctcaggatgggcctgaagacaaatgtggtcgtcgccaccatggtcctccagtgcctctccagcgccaaacggacagatgaggctgtggacatcctgctacatcggatctccgagctcgggtgcgtgcctgacgccttctcatactccattgttctgaagagcttatgcgatgatagcaggagccagcgggcactcgacctgctccacatgtgggagaaagaacgaggtgtctgctcccccaacgtagtgacgtataacacgggcatccacggcttctttaaggaaggtgaagtaagcaaggcatgcaatctattccatgaaatggtgcagaaaggggttgaacctaatgtggtgacatatagcttgaccattgatgcgctgtgcaaggccagagctatggacaaagcagagttgttcctccggcagatgattgataaaggtgttcaaccgaacaatgtgacatataatgtcatgatccatggatattccactctgggccagtggaaagaagcgggtaaaatgttcagagaaatgacaagacagggtctcataccagatcttgttacttggacctcgttcatggcctctctctgtaagcatggaagaaccaaagaagctgccgaattttttgattccatgactgccaagggccacaagcctgatttggtcacgtaccatgttctgctccatgggcatgcaaccgaaggatgctttgctgatatgattaatctctttaatgcaatggcaaccaaaggtattctacccgaccgtcaggttttcaacattttaattgatgcacatgctaaacatcgaatgatggatgaagctatgcacatatttactggaatgcaggggcaaggagtgtgtccagatgtatggacctattcaactctaatatctgcactttgcagaatgggtaggctggctgatgccatggataacttcagtcagatgattggtaagggagtacaactgaacacagttgtttatcactccctaattcagggtttctctacacatggtgatttgaggaaagcaaaggagttggtttatgaaatgacgaacaaaggtattccttgtccaaacattgcattcttcagttctataatggacagtctatgcaaagaaggaagggttatggatgcacatgatatcttccacttggttacagacataggtctgaaacctaacatcattacgtttaatacgctgattgatggatattgcttagtcggtgagatggagaaagcatttggagtacttgattccatggtatcagctggcattgaggctgatgtttttacatataatacacttgcttatggctattgtagatgtggaaggactgatgatgggttgattctcttcagagaaatggtgcaaaacaaacctaagcccacaacaatcacatataacatcatactggatgggttatttcgtgctgggagaacatttgctgcaaagaaaatgttccttgagatgaccgaaacgggaataacagtgagcatttccacatacagtataatacttggaggactttgtaggaataattgctctgacgaagcgatcaccctatttcagaaattaggagcaatggatgtgaagtttgatattaaaatactcaataccatgatcaatgccatgttcaaggttcggagaagagaagaagctaacggtttgtttgctggaatatcagccagtaggatggtacctaatgcttctacctacagcgtaatgataggaaatcttctaaaagaaggatcagtggaagaagctgaaaatatgttctcattaatggagaagagtggttgtgctccagactctcgtcttataaataatatcatcagaatattattggaaaacggtgacatcgtcaaggctggaaattatatgtctaaagttgatggcaagagcatctcacttgaagcttcaactacttcgttgttgatgtgtctcttttcaagtaaagggaaatatcgggaacaaatcagtttgctccctgtaaattaccaatttttcaatggagtcagt

SEQ ID NO: 1756 - DNA, 2460 bp, Triticum aestivum; identical to SEQ ID NO: 1755
  source 1..2460: mol_type = genomic DNA

SEQ ID NO: 1757 - DNA, 2472 bp, Triticum aestivum
  source 1..2472: mol_type = genomic DNA
atgtcccgcctccgccactccacctccaccgtgccgatgttccacctccgcctcctccgctgccgcttctcctccatctccaccttgccgccgtcacgctcatggtctccccatgcagcctttgccgcggccacagagcgcgtcatagctgggacgctcagcccggaggacgcacaccgcctgttcgacgaattgctacggcaggccactccggtccccgcgcgctccctgaacggcttcctcacggccctctctcgtgcgccggacaccggcgcctgcagagacggccccgccctcgccctcgccctcttcaaccgcacccgccgagaagaggccggctcccgggtggtgtcgtccacaatcttcacctacggcatcctcatgaactgctgccgccgcacgcgtcgtccggaacttgggcttgccttctttgggcgcgtcctcagaatgggcctgaagacaaatgtggtcgtcgccaccatggtcctccagtgcctctgcagcgccaaacggacagatgaggctgtggacatcctgctacatcggatgtccgagctcgggtgcgtgcctgacgccttctcatactccattgttctgaagagcttatgcgatgatagcaggagccagcgggcactcgacctgctccacatgtgggagaaagaacgaggtgtctgctcccccaacgtagtgacgtataacacggtcatccacggcttctttaaggaaggtgaagtaagcaaggcatgcaatctattccatgaaatagtgcagaaaggggttgaacctaatgtggtgacatatagcttgaccattgatgcgctgtgcaaggccagagctatggacaaagcagagttgttcctccggcagatgattgataaaggtgttcaaccgaacaaagtgacatataatgtcatgatccatggatattccactctgggccagtggaaagaagcgggtaaaatgttcagagaaatgacaagacagggtctcataccagatcttgttacttggacctcgttcatggcctctctctgtaagcatggaagaaccaaagaagctgccgatttttttgattccatgactgccaagggccacaagcctgatttggtcacgtaccatgttctgctccatgggcatgcaaccgaaggatgctttgctgatatgattaatctctttaatgcaatggcaaccaaaggtattctacccgaccgtcaggttttcaacattttaattgatgcacatgctaaacatggaatgatggatgaagctatgcacatatttactggaatgcaggggcaaggagtgtgtccagatgtatggacctattcaactctaatatctgcactttgcagaatgggtaggctggctgatgccatggataacttcagtcagatgattggtaagggagtacaaccgaacacagttgtttatcactccctaattcagggtttctctacacatggtgatttgaggaaagcaaaggagttggtttatgaaatgacgaacaaaggtattccttgtccaaacattgcattcttcagttctataatggacagtctatgcaaagaaggaagggttatggatgcacatgatatcttccacttggttacagacataggtctgaaacctaacatcattacgtttaatacgctgattgatggatattgcttagtcggtgagatggagaaagcatttggagtacttgattccatggtatcagctggcattgaggctgatgtttttacatataatacacttgcttatggctattgtagatgtggaaggattgatgatgggttgattctattcagagaaatggtgcaaaacaaacctaagcccacaacaatcacatataacatcatactggatgggttatttcgtgctgggagaacatttgctgcaaagaaaatgttccttgagatgaccgaaacgggaataacagtgagcatttccacatacagtataatacttggaggactttgtaggaataattgctctgacgaagcgatcaccctatttcagaaattaggagcaatggatgtgaagtttgatattaaaatactcaataccatgatcaatgccatgttcaaggttcggagaagagaagaagctaacggtttgtttgctggaatatcagccagtaggatggtacctaatgcttctacctacagcgtaatgataggaaatcttctaaaagaaggatcagtggaagaagctgaaaatatgttctcattaatggagaagagtggttgtgctccagactctcgtcttataaataatatcatcagaatattattggaaaacggtgacatcgtcaaggctggaaattatatgtctaaagttgatggcaagagcatctcgcttgaagcttcaactacttcgttgttgatgtgtctcttttcaagtaaagggaaatatcgggaacaaatcagtttgctccctgtaaattaccaatttttcaatggagtcagt

SEQ ID NO: 1758 - DNA, 2460 bp, Triticum aestivum; identical to SEQ ID NO: 1755
  source 1..2460: mol_type = genomic DNA

SEQ ID NO: 1759 - DNA, 2460 bp, Triticum aestivum; identical to SEQ ID NO: 1755
  source 1..2460: mol_type = genomic DNA

SEQ ID NO: 1760 - DNA, 2460 bp, Triticum aestivum
  source 1..2460: mol_type = genomic DNA
atgtcccgcctccgccactccacctccaccgcgccgatgttccacctccgcctcctccgctgccgcttctcctccatctccaccttgccgccgtcacgctcatggtctccccatgcagcctttgccgcggccacagagcgcgtcatcgctgggacgctcagcccggaggacgcacaccgcctgttcgacgaattgctacggcaggccactccggtccccgcgcgctccctgaacggcttcctcacggccctctcccgtgcgccggacaccggcgcctgcagagacggccccgccctcttcaaccgcacccgccgagaagaggccggctcccgggtggtgtcgtccacaatcttcacctacggcatcctcatgaactgctgcggccgcacgcgtcgtccggaacttgggcttgccttctttgggcgcgtcctcaggatgggcctgaagacaaatgtggtcgtcgccaccatggtcctccagtgcctctccagcgccaaacggacagatgaggctgtggacatcctgctacatcggatgtccgagctcgggtgcgtgcctgacgccttctcatactccattgttctgaagagcttatgcgatgatagcaggagccagcgggcactcgacctgctccacatgtgggagaaagaacgaggtgtctgctcccccaacgtagtgacgtataacacggtcatccacggcttctttaaggaaggtgaagtaagcaaggcatgcaatctattccatgaaatggtgcagaaaggggttgaacctaatgtggtgacatatagcttgaccattgatgcgctgtgcaaggccagaactatggacaaagcagagttgttcctccggcagatgattgataaaggtgttcaaccgaacaatgtgacatataatgtcatgatccatggatattccactctgggccaatggaaagaagcgggtaaaatgttcacagaaatgacaagacagggtctcataccagatcttgttacttggacctcgttcatggcctctctctgtaagcatggaagaaccaaagaagctgccgaattttttgattccatgactgccaagggccacaagcctgatttggtcacgtaccatgttctgctccatgggcatgcaaccgaaggatgctttgctgatatgattaatctctttaatgcaatggcaaccaaaggtattctacccgaccgtcaggttttcaacattttaattgatgcacatgctaaacatggaatgatggatgaagctatgcacatatttactggaatgcaggggcaaggagtgtgtccagatgtatggacctattcaactctaatatctgcactttgcagaatgggtaggctggctgatgccatggataacttcagtcagatgattggtaagggagtacaaccgaacacagttgtttatcactccctaattcagggtttctctacacatggtgatttgaggaaagcaaaggagttggtttatgaaatgacgaacaaaggtattccttgtccaaacattgcattcttcagttctataatggacagtctatgcaaagaaggaagggttatggatgcacatgatatcttccacttggttacagacataggtctgaaacctaacatcattacgtttaatacgctgattgatggatattgcttagtcggtgagatggagaaagcatttggagtacttgattccatggtatcagctggcattgaggctgatgtttttacatataatacacttgcttatggctattgtagatgtggaaggattgatgatgggttgattctcttcagagaaatggtgcaaaacaaacctaagcccacaacaatcacatataacatcatactggatgggttatttcgtgctgggagaacatttgctgcaaagaaaatgttccttgagatgaccgaaacgggaataacagtgagcatttccacatacagtataatacttggaggactttgtaggaataattgctctgacgaagcgatcaccctatttcagaaattaggagcaatggatgtgaagtttgatattaaaatactcaataccatgatcaatgccatgttcaaggttcggagaagagaagaagctaacggtttgtttgctggaatatcagccagtaggatggtacctaatgcttctacctacagcgtaatgataggaaatcttctaaaagaaggatcagtggaagaagctgaaaatatgttctcattaatggagaagagtggttgtgctccagactctcgtcttataaataatatcatcagaatattattggaaaacggtgacatcgtcaaggctggaaattatatgtctaaagttgatggcaagagcatctcacttgaagcttcaactacttcgttgttgatgtgtctcttttcaagtaaagggaaatatcgggaacaaatcagtttgctccctgtaaattaccaatttttcaatggagtcagt

SEQ ID NO: 1761 - DNA, 2475 bp, Triticum aestivum
  source 1..2475: mol_type = genomic DNA
atgccccgctcccgcctccgtcgctacgcctccaccatgccgatgtccagcctccgtcccctccaccgcagctcctcctccaccacgtcgcctgcacgcgcctggtccccccatgccgccttcgccgcggccacggagcgtgtccgcgccgggacggtcaggccggaagacgcacacaccctgttcgacgaattgcttcggcaggccacaccggtcccccagcgatccctgaacggcttccttgccgccctcgcccgtgcgcccgcctccggcgcctgcatcagagatggccccgcccttgcagtggctctcttcaaccgtgtgtgcagagacgaagccggcccgcaggtggcggcgctcacaggctgcacctacagcatcctcatggactgctgctgccgcgcccgtcgcccggacctagggcttgccttatttggccgcttcctcagggaaggcctgaagacagaccagatcgtcgccaacaccttcctcaagtgcctctgctacgcgaaacggacggatgaggcagtggacgtgctgcttcataggatgtccgagctcgggtgtgtgcctgatgccttctcatacaacactgtcctgaagagcttatgcgacaatggcatgagtcagcgggcgctcgacctgctccagaggatggcgaaagaaggaggtgtctgctctctcaatctggtggcatataacacggtcatccatggcttctttaaggaaggtgaaacaggcaaggcatgcagtctgttccatgaaatgatgcagcaaggtgttgtgcccaatgtgtggacgtatacctcgattattgatgcattgtgcaaggccagagcaatggacaaggcagagctagtccttcgtcagatggttgctaaaggtgctcaacctgatatagtgacatatacttgcatgatcaatggatatgccacatctgggcggttgaaagaggctgctaaaatgttcagagaaatgaaaagccggggtcttacaccaaatattgttacctgcggctcgttaatgacttacctttgcaagcatggaagaagcaaagaagctagagaaatatttgattccatgactgccaaaggccacagagctaatgtcgtctcgtactgtattttgcttcatgggtatgccaatgaaggatgctttgctgatatgattgatctctttaattcaatgaaaagcaacggtattgcagccgactgccgtgttttcaacatattaattaatggatatgctaaacgtggaaagatggatgaagctatgctcatatttacggaaatgtgggaaaaaggagtgagtcccgatgtggttacctattccactgtaatagctgcactttccaggatgggtagattgaccgatgccatggacaaatttaatcagatgatttccatgggggttcaaccgaacacagctgtttatcactccctaattcagggctcttgtatgcatggtgatttgattaaagccaaggagctggtttctgaaatgatgaacaaaggtattcctcgtcctagcattgcgttcttcggttcaataataaacaggttatgcaaagatggaagggttatggatgcacatgatatctttgacttggttatagacataggcgagaggcctagtgtcattacatttaattcactgattgacggatattgcttagtcgggaagatggataaagcatttaaaatactcgatgccatggaagtagttggtgttgagtctgatgttattacatatagtacacttcttgatggctattttaaaaatggaaggatcaatgatggtttgactctgtttagagaaatgccgcataagggaattaaacctgacactgtgacatatggcatcatgttggatgggttgtttcgtgctggcagaactgttgctgtaaggacagtgttccatgagatgatcgaaagtggaataacagtggacatccccacatacaatatagttcttggaggactttgtagaaataactgcacagatgaagcaatcgccctgttccagaaattaggtgcaatgagtgtgaagtccaatattgcaatactcaataccatgatcgatggaatgtacaaggttcggagaagagaagaagccaatgatttatttgctacaatatcagccagtggattggtgcccaatgaatctacttatgcagtaatgataataaatcttctaaaagatggagcagtggaagaagcagacaatatgttttcatcaatggagaaaactggtatagtccccagctcccgtctgttaaatcacatcatcagaatgttgttggaaataggtgagattgccaaggccggaaattacttgtctaaagttgatgggaagagcatctcacttgaagcgtcaacaacttcattgatgttgtctttcttttcgaagaaaggcaaatatcgggaggacatgaaattgctgcctgcaaagtttcaaatttttgatggatttggt

SEQ ID NO: 1762 - DNA, 2475 bp, Triticum aestivum
  source 1..2475: mol_type = genomic DNA
atgccccgctcccgcctccgtcgctacgcctccaccatgccgatgtccagcctccgtcccctccaccgcagctcctcctccaccacgtcgcctgcacgcgcctggtccccccatgccgccttcgccgcggccacggagcgtgtccgcgccgggacggtcaggccggaagacgcacacaccctgttcgacgaattgcttcggcaggccacaccggtcccccagcgatccctgaacggcttccttgccgccctcgcccgtgcgcccgcctccggcgcctgcatcagagatggccccgcccttgcagtggctctcttcaaccgtgtgtgcagagacgaagccggcccgcaggtggcggcgctcacaggctgcacctacagcatcctcatggactgctgctgccgcgcccgtcgcccggacctagggcttgccttatttggccgcttcctcagggaagacctgaagacagaccagatcgtcgccaacaccttcctcaagtgcctctgctacgcgaaacggacggatgaggcagtggacgtgctgcttcataggatgtccgagctcgggtgtgtgcctgatgccttctcatacaacactgtcctgaagagcttatgcgacaatggcatgagtcagcgggcgctcgacctgctccagaggatggcgaaagaaggaggtgtctgctctctcaatctggtggcatataacacggtcatccatggcttctttaaggaaggtgaaacaggcaaggcatgcagtctgttccatgaaatgatgcagcaaggtgttgtgcccaatgtgtggacgtatacctcgattattgatgcattgtgcaaggccagagcaatggacaaggcagagctagtccttcgtcagatggttgctaaaggtgctcaacctgatatagtgacatatacttgcatgatcaatggatatgccacatctgggcggttgaaagaggctgctaaaatgttcagagaaatgaaaagccggggtcttacaccaaatattgttacctgcggctcgttaatgacttacctttgcaagcatggaagaagcaaagaagctagagaaatatttgattccatgactgccaaaggccacagagctaatgtcgtctcgtactgtattttgcttcatgggtatgccaatgaaggatgctttgctgatatgattgatctctttaattcaatgaaaagcaacggtattgcagccgactgccgtgttttcaacatattaattaatggatatgctaaacgtggaaagatggatgaagctatgctcatatttacggaaatgtgggaaaaaggagtgagtcccgatgtggttacctattccactgtaatagctgcactttccaggatgggtagattgaccgatgccatggacaaatttaatcagatgatttccatgggggttcaaccgaacacagctgtttatcactccctaattcagggctcttgtatgcatggtgatttgattaaagccaaggagctggtttctgaaatgatgaacaaaggtattcctcgtcctagcattgcgttcttcggttcaataataaacaggttatgcaaagatggaagggttatggatgcacatgatatctttgacttggttatagacataggcgagaggcctagtgtcattacatttaattcactgattgacggatattgcttagtcgggaagatggataaagcatttaaaatactcgatgccatggaagtagttggtgttgagtctgatgttattacatatagtacacttcttgatggctattttaaaaatggaaggatcaatgatggtttgactctgtttagagaaatgccgcataagggaattaaacctgacactgtgacatatggcatcatgttggatgggttgtttcgtgctggcagaactgttgctgtaaggacagtgttccatgagatgatcgaaagtggaataacagtggacatccccacatacaatatagttcttggaggactttgtagaaataactgcacagatgaagcaatcgccctgttccagaaattaggtgcaatgagtgtgaagtccaatattgcaatactcaataccatgatcgatggaatgtacaaggttcggagaagagaagaagccaatgatttatttgctacaatatcagccagtggattggtgcccaatgaatctacttatgcagtaatgataataaatcttctaaaagatggagcagtggaagaagcagacaatatgttttcatcaatggagaaaactggtatagtccccagctcccgtctgttaaatcacatcatcagaatgttgttggaaataggtgagattgccaaggccggaaattacttgtctaaagttgatgggaagagcatctcacttgaagcgtcaacaacttcattgatgttgtctttcttttcgaagaaaggcaaatatcgggaggacatgaaattgctgcctgcaaagtttcaaatttttgatggatttggt

SEQ ID NO: 1763 - DNA, 2475 bp, Triticum aestivum; identical to SEQ ID NO: 1762
  source 1..2475: mol_type = genomic DNA

SEQ ID NO: 1764 - DNA, 2475 bp, Triticum aestivum; identical to SEQ ID NO: 1762
  source 1..2475: mol_type = genomic DNA

SEQ ID NO: 1765 - DNA, 2475 bp, Triticum aestivum; identical to SEQ ID NO: 1761
  source 1..2475: mol_type = genomic DNA

SEQ ID NO: 1766 - DNA, 2475 bp, Triticum aestivum; identical to SEQ ID NO: 1762
  source 1..2475: mol_type = genomic DNA

SEQ ID NO: 1767 - DNA, 2475 bp, Triticum aestivum
  source 1..2475: mol_type = genomic DNA
atgccccgctcccgcctccgtcgctacgcctccaccatgccgatgtccagcctccgtcccctccaccgcagctcctcctccaccacgtcgcctgcacgcgcctggtccccccatgccgccttcgccgcggccacggagcgtgtccgcgccgggacgctcaggccggaagacgcacacaccctgttcgacgaattgcttcggcaggccaccccggtccccgaccgctccctcaacggcttccttgccgccctcgcccatgcgcccgcctccggcaactgcatcagagatggccccgccctcgcagttgctctcttcaaccgtgtgtgcagagaggaagccggcccgcgggtggcggtgctcacaggctgcacctacagcatcctcatggactgctgctgccgcgcccgtcgcccggacctagggcttgccttatttggccgcttcctcagggaaggcctgaagacagaccagatcgtcgccaacaccttcctcaagtgcctctgctacgcgaaacggacggatgaggcagtggacgtgctgcttcataggatgtccgagctcgggtgtgtgcctgatgccatctcatacaacactgtcctgaagagcttatgcgacaatggcatgagccagcgggggctcgaactgctccagatgattgcaaaagaaggaggtgtctgctctctcaatctggtggcatataacacggtcatctacggcttctttaaggaaggtgaaacaggcaaggcacgcaatctattccatgaaatgatgcagcaaggtgttgagcccgatgtggtgacttacaacttgatcattgatgcgttgtgcaaggccagagcaatggacaaggcagaagtagtccttcagcagatgatcagtaaaggtgctcaacctgatacagtgacatataattgcatgatcaatggatatgccacatctgggcggttgaaagagtctgctaaactgttcagagaaatgaaaagccggggtcttacaccaaataatgttacttgcaactccttcctgtcctccctttgcaagcatggaagaagcaaagaagctagagaaatatttgattccatgactgccaaaggccgcagagctaatgtcgtctcatactctattttgcttcatgggtatgccaatgaaggatgctttgctgatatgattgatctctttaattcaatgaaaagcaacggtattgcagctgactgccgtgtttttaccatattaattgatgcctatgctaaacgtggaatgatggatgatgcaatgcacatatttacggaaatgcaacaacaaggtgtgagtccaaatgttgtcacatattcaactgtaatatcagcactttctagaatgggtaggttgaccgattctatggaaaaatttaatcagatggttgccttgggagtacagccggatagagctatttatcggtccctaattcagggcttttgtatgcatggtggtttggttaaagctaaggagttggtttctcaaatgataaacaaaggtattcctcgtcctagcattgagttcttcaattcagtaataaacagtatgtgcaaggaaggaagggttatggatgcacatgatatctttgacttggttatagacattggtgagaggcctgatgacattacatttaattcactgattgacggatattgcttagtcgggaagatggataaagcatttaaaatactcgatgccatggaagtagttggtgttgagcctgatgttattacatataatacacttcttgatggctattttaaaaatggaaggatcaatgatggtttggctctgtttagagaaatgccgcataagagaattaaacctgacattgtgacatatggcatcatgttggatgggttgtttcgtgctggcagaactgtttctgcaaggacaatgttccatgagatgatcgaaagtggaataacagtgaacatcttcacatacaatatagttcttggaggactttgtagaaataactgcacagatgaagcaatcgccctgttccagaaattaggtgcaatgagtgtgaagttcaatattgcaacacttaataccatgatcgatggaatgtacaaggttcggagaagagaagaagccaatgatttatttgctacaatatcagccagtggattggtgcccaatgaatctacttatgcagtaatgataataaatcttctaaaagatggagcagtggaagaagcaaacaatatgttttcctcaatggagaaaactggtatagtccccagctcccgtctgttaaatcgcatcatcagaatgttgttggaaataggtgagattgccaaggccggaaattacttgtctaaagttgatgggaagagcatctcacttgaagcgtcaacaacttcattgatgttgtctttcttttcgaagaaaggcaaatatcgggaggacatgaaattgctgcctgcaaagtttcaattttttgatggatttggt

SEQ ID NO: 1768 - DNA, 2442 bp, Triticum aestivum
  source 1..2442: mol_type = genomic DNA
atgtcgcgcatccgcctccgccgccgccgccgccaccgcctcccctcttccacctcgcgaccctcaccctcgtggtctccccacgccgcctgtgcggcggccacggagcgcgtccgcgccggaacgctcagcccgcaagacgcacaccacctgttcgacgaattgttaaggcaggccaccccggtccctgagcgctccctgaacggattcctcgccgccctcagccgtgctacgccctccaaagcctgcagagacggccccgccctcgtcctctccctcttcaaccgtgtctgccgagaagaagccggcggcatgcgggtggcgccgcccaccatcttcacctacggcgtcctcatgaactgctgctgccgcacccgtcgtccggaacttgggctcgccttcttcggccgcctcctaaggacgggcctgaaggcagacaagaccatcgccaacactgtcctcaagtgcctgtgctgcgctaaacggacagacgatgctgtgaaagtgctgcgtcgtaggatgagcgagctggggtgtgtgcctgatgccttctcatacgccattgtcctgaagggcttatgtgatgataacaggagccagcaggcgctcgacctgctccggatgatggcgaaagaaggtgtgtgctcccctgacgtggtcacatataacacggtcatccacggcttctttaaggaaggaaaaataggcaaggcctgcaatctattccatgaaatgacgaagcaagggtttgtgcctaatgtggtgacatataactcggttatcagtgcattgtgcaaggcccgagcaatggacaatgcagagttgttccttcgggagatggttgataacggcgttcaaccgaataaagtgacatatactagcatgatccatggatattccactttgggccagtggaaagaggcgactaaactgttcagagaaatgacaagcagtggtcttataccagatattgtcacttggaattcgttcattgactccctttgcaagcatggaagaagcaaagaagctgcagaaaattttcattccatgtctgcaaagggccacaagcctgatatcatctcctacgccactcttcttcatgggtatgccaatgaaggaagctttcctgatatgatgagtttctttaagtcaatggaaggcgacggtattgtagccaactgccaagttttcaacatattaattgatgcatatgctaaacgaggaatgatggacgaagctatgctcatatttactgaaatgccaggacaaggagtcaatccaaatgtagtcacctattcaactgtgatagcttcactttgcagaatgggtaggctggctgatgcaatgaataagttcagtgagatgattggtacgggagtacaaccgaacacagttgtttatcactccctagttcagggcttatgtacacatggtgatttggtgaaagcgaaggagttgatttctgaaatgatgaataaaggtattcctcgtccaaacattgcattcttcagttcaatagtacacagtctatgcaaagaaggaagggttatggatgcacaccatatctttgacttggttaaagacataggggagagatctgacatcattatgtttaatacgctgattgatggatattgcctaattggtgagatgggcaaagcagtcagtgtactagatgtcatgatatcagccggcattgagcctgatatctttacatataatacacttgtcaatggttattttaagagtggaaggattgatgatgggttgaatctgttcagagaaatgtcacataagaaaattaaaccttcaactgttacatataacatcatactggatggattatttcgtgctgggagaaccgttgctgccaagaaaatgctccatgagatgatcggatgtggaacaactgtgagcttgtccacatacaacataattcttagaggactttgtagaaataattgcaccgacgaagcaatcgccatgttccagaaattacgcacaattaatgtaaagttcaatatcacaacactcaataccatgattaattcaatgtacactgttcagagaagagaagaagctaaagatttgtttgctgcaatatcagacagcgggttggtgcccaatgtctctacatacggcataatgatacgaaatcttctaaaagaaggatcagtgaaagaagctgacaatatgttcttatcaatggagaagagtggttgtgctccttgctcccgtcttttaaatgataccattagaacgttattggagaagggggagatagtcaaggccggaaattatatgtctaaagttgatggcaagagcatctcacttgaagcttcaactagttcattgttgttgtctctgttttctgggaaaggtaaatatcgtgaacaaatacaattgctccctgtaaaataccaattcttcggtggagttagt

SEQ ID NO: 1769 - DNA, 2442 bp, Triticum aestivum; identical to SEQ ID NO: 1768
  source 1..2442: mol_type = genomic DNA

SEQ ID NO: 1770 - DNA, 2442 bp, Triticum aestivum
  source 1..2442: mol_type = genomic DNA
atgtcgcgcatccgcctccgccgccgccgccgccaccgcctcccctcttccacctcgcgaccctcacccacgttgtctccccacgccgcctgtgcggcggccacggagcgcgtccgcgccggaacgctcagcccgcaagacgcacaccacctgttcgacgaattgttaaggcaggccaccccggtccccgagcgctccctgaacggattcctcgccgccctcagccgtgctacgccctccaaagcctgcagagacggccccgccctcgtcctctccctcttcaaccgtgtctgccgagaagaagccggcggcatgcgggtggcgccgcccaccatcttcacctacggcgtcctcatgaactgctgctgccgcacccgtcgtccggaacttgggctcgccttcttcggccgcctcctaaggacgggcctgaaggcagacaagaccatcgccaacactgtcctcaagtgcctgtgctgcgctaaacggacagacgacgctgtgaaagtgctgcgtcgtaggatgagcgagctggggtgtgtgcctgatgccttctcatacgccattgtcctgaagggcttatgtgatgataacaggagccagcaggcgctcgacctgctccggatgatggcgaaagaaggtgtgtgctcccctgacgtggtcacatataacacggtcatccacggcttctttaaggaaggaaaaataggcaaggcctgcaatctattccatgaaatgacgaagcaagggtttgtgcctaatgtggtgacatataactcggttatcaatgcattgtgcaaggcccgagcaatggacaatgcagagttgttccttcagcagatggttgatgacggcgttcaaccgaataaagtgacatatactagcatgatccatggatattccactttgggccagtggaaagaggcgactaaactgttcagagaaatgacaagcagtggtcttataccagatattgtcacttggaactcgttcattgactccctttgcaagcatggaagaagcaaagaggctgcagaaatttttcattccatgtctgcaaagggccacaagcctgatatcatctcctacgccactcttcttcatgggtatgccaatgaaggaagctttcctgatatgatgagtctctttaagtcaatggaaggcgacggtattgtagccaactgccaagttttcaacatattaattgatgcatatgctaaacgaggaatgatggacgaagctatgctcatatttactgaaatgccaggacaaggagtcaatccaaatgtagtcacctattcaactgtgatagcttcactttgcagaatgggtaggctggctgatgcaatgaataagttcagtgagatgattggtacgggagtacaaccgaacacagttgtttatcactccctagttcagggcttatgtacacatggtgatttggtgaaagcgaaggagttgatttctgaaatgatgaataaaggtattcctcgtccaaacattgcattcttcagttcaatagtacacagtctatgcaaagaaggaagggttatggatgcacaccatatctttgacttggttaaagacataggggagagatctgacatcattatgtttaatacgctgattgatggatattgcctaatcggtgagatgggcaaagcactcagagtacttgatgccatgatatcagctggcattgagcctgatatctttacatataatacacttgtcaatggttattttaagagtggaaggatcaatgatgggttgagtctgttcagagaaatgtcacacaaggaaattaaacctacaactgttacatataacatcatactggatggattatttcgtgctgggagaactgttgctgccaagaaaatgctccatgagatgaccggatgtggaacaactgtgagcttgtccacatacaacataattcttagaggactttgtagaaataattgcaccgacgaagcaatcgccatgttccagaaattacacacaatgaatgtaaagttcaatatcacaacactcaataccatgattaattcaatgtacactgttcagagaagagaagaagctaaagatttgtttgctgcaatatcagacagtgggttggtgcccaatgcctctacatacgacataatgatacgaaatcttctaaaagaaggatcagtggaagaagctgacaatatgttcttatcaatggagaagagtggttgtgctccttgctctcgtcttttaaatgataccattagaacgttattggagaagggggagatagtcaaggccggaaattatatgtctaaagttgatggcaagagcatctcacttgaagcttcaactagttcattgttgttgtctctgttttctgggaaaggtaaatatcgtgaacaaatacaattgctccctgtaaaataccaattcttcggtggagttagt

SEQ ID NO: 1771 - DNA, 2442 bp, Triticum aestivum
  source 1..2442: mol_type = genomic DNA
atgtcgcgcatccgcctccgccgccgccgccgccaccgcctcccctcttccacctcgcgaccctcaccctcgtggtctccccacgccgcctgtgcggcggccacggagcgcgtccgcgccggaacgctcagcccgcaagacgcacaccacctgttcgacgaattgttaaggcaggccaccccggtccctgagcgctccctgaacggattcctcgccgccctcagccgtgctacgccctccaaagcctgcagagacggccccgccctcgtcctctccctcttcaaccgtgtctgccgagaagaagccggcggcatgcgggtggcgccgcccaccatcttcacctacggcgtcctcatgaactgctgctgccgcacccgtcgtccggaacttgggctcgccttcttcggccgcctcctaaggacgggcctgaaggcagacaagaccatcgccaacactgtcctcaagtgcctgtgctgcgctaaacggacagacgatgctgtgaaagtgctgcgtcgtaggatgagcgagctggggtgtgtgcctgatgccttctcatacgccattgtcctgaagggcttatgtgatgataacaggagccagcaggcgctcgacctgctccggatgatggcgaaagaaggtgtgtgctcccctgacgtggtcacatataacacggtcatccacggcttctttaaggaaggaaaaataggcaaggcctgcaatctattccatgaaatgacgaagcaagggtttgtgcctaatgtggtgacatataactcggttatcagtgcattgtgcaaggcccgagcaatggacaatgcagagttgttccttcgggagatggttgataacggcgttcaaccgaataaagtgacatatactagcatgatccatggatattccactttgggccagtggaaagaggcgactaaactgttcagagaaatgacaagcagtggtcttataccagatattgtcacttggaattcgttcattgactccctttgcaagcatggaagaagcaaagaagctgcagaaaattttcattccatgtctgcaaagggccacaagcctgatatcatctcctacgccactcttcttcatgggtatgccaatgaaggaagctttcctgatatgattagtttctttaagtcaatggaaggcgacggtattgtagccaactgccaagttttcaacatattaattgatgcatatgctaaacgaggaatgatggacgaagctatgctcatatttactgaaatgccaggacaaggagtcaatccaaatgtagtcacctattcaactgtgatagcttcactttgcagaatgggtaggctggctgatgcaatgaataagttcagtgagatgattggtacgggagtacaaccgaacacagttgtttatcactccctagttcagggcttatgtacacatggtgatttggtgaaagcgaaggagttgatttctgaaatgatgaataaaggtattcctcgtccaaacattgcattcttcagttcaatagtacacagtctatgcaaagaaggaagggttatggatgcacaccatatctttgacttggttaaagacataggggagagatctgacatcattatgtttaatacgctgattgatggatattgcctaattggtgagatgggcaaagcagtcagtgtactagatgtcatgatatcagccggcattgagcctgatatctttacatataatacacttgtcaatggttattttaagagtggaaggattgatgatgggttgaatctgttcagagaaatgtcacataagaaaattaaaccttcaactgttacatataacatcatactggatggattatttcgtgctgggagaaccgttgctgccaagaaaatgctccatgagatgatcggatgtggaacaactgtgagcttgtccacatacaacataattcttagaggactttgtagaaataattgcaccgacgaagcaatcgccatgttccagaaattacgcacaattaatgtaaagttcaatatcacaacactcaataccatgattaattcaatgtacactgttcagagaagagaagaagctaaagatttgtttgctgcaatatcagacagcgggttggtgcccaatgtctctacatacggcataatgatacgaaatcttctaaaagaaggatcagtgaaagaagctgacaatatgttcttatcaatggagaagagtggttgtgctccttgctcccgtcttttaaatgataccattagaacgttattggagaagggggagatagtcaaggccggaaattatatgtctaaagttgatggcaagagcatctcacttgaagcttcaactagttcattgttgttgtctctgttttctgggaaaggtaaatatcgtgaacaaatacaattgctccctgtaaaataccaattcttcggtggagttagt

SEQ ID NO: 1772 - DNA, 2442 bp, Triticum aestivum; identical to SEQ ID NO: 1768
  source 1..2442: mol_type = genomic DNA

SEQ ID NO: 1773 - DNA, 2442 bp, Triticum aestivum; identical to SEQ ID NO: 1768
  source 1..2442: mol_type = genomic DNA

SEQ ID NO: 1774 - DNA, 2442 bp, Triticum aestivum; identical to SEQ ID NO: 1768
  source 1..2442: mol_type = genomic DNA

SEQ ID NO: 1775 - DNA, 2436 bp, Triticum aestivum
  source 1..2436: mol_type = genomic DNA
atgtccaacctccgcctcctccgccgcagctcctcctccacctccacccccacctcgtggtcctcgcgttcatggtctccccacgcagcctttgccgcggccacagagcgtgtccgcgccgggacgctgaaccaagacgacgcacaccacctgtttgacgaattgctgcggcaggccaacccggtccccgggcgctccctgaacggcttcctcgccgccctcgcacgtgctacgtcctctgccgcctgcatcagagatggtcccaccctcgccatcgccctcttcaaccgcctgtgccgagaacaagccggcctgcgggtagcgcctctcacgatccacacctacggcatcctcatggactgctgctgtcgtgcaagtcgcccggagctagggcttgccttattcggccgctttctcaggacgggcctcaagacaaacgagatcgtcgccagcaccttcctcaagtgcctctgctacgcaaaacggacggatgaggctgtgaatgtgctgcttcataggatgtccgagctcggctgtgtgcctaatgccatctcatactccattgttctgaagagcttatgcgacaatagcatgagtctgcgggcgctcgacctgctccagatgatggcgaaagaaggaggtgcctgctcccccaacgtggtggcatatagcacggtcatccatggcttctttaaggaaagcgaaacaggcaaggcatgcaatctgttccatgaaatgatgcagcaaggtgttgaacccagtgtgtggacatatagttcaatcattgatgcattgtgcaaggccagagcaatggacaaggcagagctagtgcttcagcagatggttaacaaaggtgttcaacccaataatgtcacatataattgcatgatccatggatattccacatctgggcagtggaaagaggctgctaaattgctcagagaaatgaaaagccggggccttataccagatattgtcacttgcaactcgttcctggcctccctttgcaagcatgggagaagcaaggaagctgcagaatttcttgattccatgactgccaagggccacaaaccagatatcgtatcataccgtattttgcttcatgggtatggtactgaaggatgcttcgctgatatgattgatgtcttttattcaatggaaagcaacggtattgcagctgactgccatgttttcaacatattaattaatggatatgcaaaacgtggaatgacagaagaagctatgctgatatttactgaaatgcagggacagggagtgagtccagatgtagtcacctattccattgtaatagccgcactttccagaatgggtaggctgaccgatgctatcgagaaattcaatgagatgactgccttggaagtacagccggacacaactgtttatcactcactgattcagggttgttgcatagacggttatttggttaaagctaaggagctgatgtttgaaatgatgaacggtggtattcctcggcctaacattgtgttcttcagttcagtaataaacagtctgtgcaaagaaggaagggttatggatgcacatgatgtcttagacttggttataggcataggtgagaggcctaatgtcattacatttaattcactgattgacggatattgcttagtcggcaacatggataaagcattcaaaatacttgatgtcatggaatcagttggtgttgagcctaatgttgttacttatagtgcacttcttgatggctattctaaaaacagaaggattgatgatgctttgactttgtttagagaaatgccgcgtaagagaattaaacctgacactgttacatatggcatcatgttggatgggttgtttcgtgctgggagaactgtcgctgcaatggaaatgttccatgagatgactgagagtggaacaacagtggacattttcatatacaatataatacttggaggtctttgtagaaataattgtgtagatgaagcgattgcactgttccagaaattgcgagcaatgaatgtgaagttcaatattgaaatactcaataccatgattaatgcaatgtacaaggttcaaagaaaggaagaagcaaaggaattgtttgctacaatatcagccaatgggttggtgcccaatgaatctacttatgcagtaatgataagaaatcttctaaaaggcggagcagtggaagatgctgacaatatgttttcatcaatggacaacagtggcatcgttcccagttcccgtcttataaatgatatcatcagaatgttgttgaaaaaaggtgagatagccaaggctggcaattatttgtctaaagttgacgggaagagtatctcacttgaagcttcaactacctcattgttgttgtctcggaaagggaaacatcaggtggatattaagttgctccctgcaaagtatcaattttttgatggatttggt

SEQ ID NO: 1776 - DNA, 2436 bp, Triticum aestivum; identical to SEQ ID NO: 1775
  source 1..2436: mol_type = genomic DNA

SEQ ID NO: 1777 - DNA, 2436 bp, Triticum aestivum; identical to SEQ ID NO: 1775
  source 1..2436: mol_type = genomic DNA

SEQ ID NO: 1778 - DNA, 2322 bp, Triticum aestivum
  source 1..2322: mol_type = genomic DNA
atgccaaccgcccgcctgtcctccgtctccgcctcctccttcaaggcttcttcacgaaaaccacgagcccccctcgccgccttggctgctgccacggagcgtgtgcgcgccggaacactaagccaggaggacgcgcaccacctgttcgacgaattgctaggccaagccaccgccgtcccggaacgcgggctgaacaactttcttgccgcactagcccgtgcatcgccctcggctacctgcagcgatggccccggccttgccgtcaccctcttcaaccgcatgtcccttggcgctggtgcacgggtggcgtcgcccacactctgtacctattccatcctcatggactgctgctgccgtgcaggccgcccagacttggtggttgccttcttcggccgcctcctcaggttggggctgcgcttgaatgtcatctccttcaacaacctcctcaaggggctttgccaggctaagcgctcaaatgaggcattggatctgctgctccaccggatgcccgaactggactgtgcgcctgatgtcttctcgttcaacatagtaatcaacggctgctttagagaaggtgaagtagacaaagcatgcaatctcttccatgagatgccccaactgggagttcaacctgatgtggtgacctacaactcaattatcatcgcactaagcagggccggagcaatgggtaaggcagaagtggtccttcggcaaatggttgataaaggcattggacccgatgtcatgacatataacagtctgatccatggatattctactttgggtcagtggaaggcagcagttagggtattcaaagagatggtaagtgttggtgttctaccaaatgctgtcacgttgaactcatttatggattcactttgcaagcatagaaggacaaaggaagctagagatatttttgactccatggctgcaaagggccacaaacctaatattgcctcctactctactatgcttaatgggtatgcgaaacaaggatgcttcgatgatatgactggtctcttcaattccatggtacagaatggtattgtacctaacaaccatgttttcaacatactgatcagagcatattctacacgtggactgatggacgaggctatgcacatgttcgaagtaatgaagcaacaaggagtaaacccagatgtagttgactatctagtagtaatagattcactttgcaaaatgggcaggatggatgctgctatggacaaatttaatcagatggtcaatcaaggagtttcacctgacatagttgtttaccaatgcctggttctgggttcttgctctaatggtgattttgtgaaagccaaagaattgatttctgaagcagttaatcgaggtctgtgttctaacagtgtgttcttctatcctgtaataaacaacctgagcaaagaaggaaatgtaaaggatgcacaagatatgtttgacttcattgtaggtattggtcatcagcctgatgttattatgtacaattcactgatggatggatattgccttgttggcaaggtggaggaagcaatgacagtgcttgatgctatgaagtccgctggcctccaacctgatgctattacgtatgctatacttcttaatggctactgtaaaattggaaggatcgacgatggattgagtctttttagggaaatctcactcagcagggttaagcccacgactattatgtacaacattatacttgatgggctgttttgctgtgggagaacagtttttgcaaaggaagaattcgatacaatgattgaaagtggcataccagtgggcattgacacatgcaccatagttcttagtggactttgcaaaaataattgcactgatgaagcaatagagctgttcaagaagttatgtgcaatgaatgtgaagtttgatgtcataattctcactaccatgatttctgcaatgtttaagactaggagagttgaagaagccaaggatttgtttgctactatatcaaccatagggttggtgccttctgtcgtgacttacagtgtaatgatgacgaatttcataaaagaagggtcgctggcagaggctgatgatatgtttttagcaatggagaaggctggctgtgctcctgactccagactgctaaatcacgtggtcagagtgttgctggagaaaggtgcagttgtaaaggctgcaacttatctcggtaaacttgatggaaaacagctgtcacttgaagcttcgacggtttcgttaattgtatctctcttctcaaggaaagggaaattaagggagcatgtaaaattgcttccggtaaagtaccagcctcctgagagttcgactgacaat

SEQ ID NO: 1779 - DNA, 2322 bp, Triticum aestivum; identical to SEQ ID NO: 1778
  source 1..2322: mol_type = genomic DNA

SEQ ID NO: 1780 - DNA, 2322 bp, Triticum aestivum; identical to SEQ ID NO: 1778
  source 1..2322: mol_type = genomic DNA

SEQ ID NO: 1781 - DNA, 2469 bp, Triticum aestivum
  source 1..2469: mol_type = genomic DNA
atgtcccgcctccgctccgcctccaccgcgccgatgccccgcctccgcctcctcagctgccgctcctactccatctccaccttgccgccgtcacgctcatggtctccccacgccgcctttgccgctgccacagagcgcgtcagcgctgggacgctcaccccggaggacgcacaccacctgttcgacgaattgctgcggcagtccactccggtccccgctcgatccctgaacggcttccttacggccctggcccgtgcgcgggacaccgacgcctgcagagacggccccgccctcgccctcgccctcttcaaccgcacccgccgagaagaggccggctcccgggtggtgtcgcccacaatcttcacctacggcatcctcatgaactgctgctgccacacgcttcgtccggatcttgggcttgccttctttgggcgcgtcctcaggatgggcctgaagacaaatgtggtcgtcgccaccacggtcctcaagtgcctctgcggcgccaaacggacagatgaggctgtgaacatcctgctacatcggatgtccgagctcgggtgtgtgcctgatgacttctcatattccattgttctgaagagcttatgtgatgatggcaggagccagcgagcacttgacctgctccagatgtgggagaaagaacgaggtgtctgctcccccaacgtagtggcatataacatagtcatccatggcttctttaaggaaggtgaagtaagcaaggcatgtgacctgttccatgcaatggtgcagcgaggggttgtgcctaatgtgatgacatataccttgactattgatgcgctgtgcaaggccagagctatggacaaagcaaagttgttcctccggcagatgattgataaaggtgttcgaccgaacaatgtgacatataatgtcatgatccatggatattccactctgggccagtggaaagaagcgggtaaagtgttcagagaaatgtcaagacagggtctcataccagatatcgttacttggacctcgttcatggcctctctctgcaagcatggaagaaccaaagaagctgccaatttttttgattccatgactgccaagggccacaagcctgatttggtcacgtatcatgttctgctccatgggtatggaaccgaaggatgctttgctgatatgattaatctcgttaattcgatggcaaccaaaggtattgttcccgatcgtcaggttttcaacattttaatcgatgcacatgctaaacatggaatgatggatgaagctatgcacatatttactggaatgcagggacaaggagtgtgtccagatgtatggacctattcaactataatatctgcactttgcagaatgggtaggctggctgatggtatggataacttcagccagatgattggtaagggagtagaaccgaacacagttgtttatcactccctaattcagggtttctctacacatggtgatttgaggaaagcgaaggagttggtttatgaaatgagaaacaaaggtattccttgtccaaacattgcattcttcacttctataatggacagtctatgcaaagaaggaagggttatggatgcacatgatatcttcaacttggttacagacataggtgagaaacctaacgtcattacgtttaatacgctgattgatggacattgcttagtcggtgagatggagaaagcatttggagtacttgattccatggtatcagctggcattgaggctgatgtttttacatataacacacttgcttatggctattgtagatgtggaaggattgatgatgggttgattctattcagagaaatgttgcgtaagaaacctaaacccacaacaattacatataacataatactggatgggttatttcgtgctgggagaacagttgctgcaaagaaaatgttccatgagatgatcgaagggggaataacagtgagcatgtccacgtacagtataatccttggaggactttgtaggaataattgtgctgaagaagcgatcaccctgtttcagaaattaggagcaatgaatgtgaaattggatattagaatactcaataccatgatcaatgcaatgttcaaggttcggagaagagaggaagctaacagtttgtttgctgcaatatcagccagtggaatggcacctaatgcttctacctacggcctaatgatagggaatcttctaaaagaaggatcagtgcaagaagccgaaaatatgttctcattaatggagaagagtggttgtgctccaggctctcgtcttataaataatatcatcagaatattattggaaaaaggtgacattgtcaaggctggaaattatatgtctaaagttgatggcaagaccatctcacttgaagcttcaactacttcgttgttgatgtgtctcttttcaagtaaagggagatatcgggaacaaatcaatttgctccctggaaattaccaatttttcaatggagtcagt

SEQ ID NO: 1782 - DNA, 2316 bp, Triticum aestivum
  source 1..2316: mol_type = genomic DNA
atgccaaccgcccgcctgtcctccgtcttcgcctcctccttcaagtcttctttacggaagccacgagctcccgtcgccgctttggctgctgccacggagcgtgtgcgcgccagaacgctaagccagcaggacgcgcaccacctgttcgacgaattgctgagccaagccgccgccgtccccgaacgcgggctgaacaactttcttgccgcactagcccgtgctccgccctcatctgcctgcagcgatggccccggccttgccattgccctcttcaaccgcatgtcccaaggcgctggtgcacgggtggtgtcgcccacgctctgtacctattccatcctcatggactgctgctgccgcgcaggccgcccggacttggtggttgccttcttcggtcgcctcatcaggttggggttgcgcttggacgtcatcgccttcagcaatctcctcaaggggctttgcaaggccaagcgctcaaatgaggctttggatctgctgctccaccggatgcccgaactggactgtgcgcctgatgtcttctcctacagcattgtaatcaacggctgctttaaagaaggtgaagtagacaaagcgtgcaatctcttccatgagatgatccaactgggagttcaacctgatgtggccatctacacctcaattatcgatgcactaagcaagtgcggagccatggacaaggcagaagtggtccttcggcaaatggttgatcaaggcattggacccgatgtcatgacatatagcagtctgatccatggatattctactttgggtcagtggaaggcagcagttagggtactcaaagagatggtaagtgttggtgttcgaccagatgctgtcacgttgaactcatttatggattcactttgcaagcatagaaggacaaaggaagctagagatatttttgactccatggctgcaaagggccacaaacctaatattgtctcctacactattatgcttaatgggtatgttaaagaaggatgcttcgatgatatgactggtctcatcaattcgatgctacagaatggtattgtacctgatcaccatgttttcaacatactgatcaatgcatattctaaacgtgggctgatggatgaggctatgcacatgttcgaagtaatgaagcaacaaggagtaaacccagatgtagttgactatctagtagtaatggattcactttgcaaaatgggtaagatggctgctgctatggataaatttaatcagatgatcaatcaaggagtttcacctaacaaagctgtttaccaatgcctggttctgggttcttgctctcatggtgattttgtgaaagccaaggaattgatttctgaagcagttaatagaggtctctgttctaacagtgtgttcttctatcctgtaataaacgacctgtgcaaagaaggaaaggtgaaggaggcacaggatatgtttgacttcattgtaggtattggtcagcggcccgatgtgattatgtacaattcactgatggatggatattgccttgttggcaaggtggaggaagcactgagagtacttgatgctatgaagtctgctggcctccaacctgatgctattacgtatgctatacttcttaatggctactgtaaaattggcaggatcgccgatggattgagtcttttcagggaaatgtcactcagcggggttaagcccacgactattatgtacagcattatacttgatgggctgtttcgctccgggagaacagtttctgcaaaggaaaaattcaatacgatggttgaaagtggcttaccagtggacgttcgcacatacaacatagttcttcatggactttgtagaaacaattgcactggtgaagcaatagagttgttcaaaaaattatgtgcaacgaacttgaagattaatgtcataacattcaataccatgatttctgcaatgtttaaaactaggagaattggagaagccaaggatttgtttgctactatatcagccatcgggttggtgccttctgttgtgacttacagtgtaatgacgacgaatttcataaaagaagggttgctggcggaggctgatgatatgtttttagcaatggagaaggctggctgtgctcctgactccagactgctaaatcacgtggtcagcgtgttgctggagaatggtgcagttgtaaaggctgcaacttatctcgctaaacttgatgcaaaacagctttcacttgaagcttcgacagtttcgttaattgtatctctcttctcaaggaaagggaaattaagggagcatgtaaagttgcttccggtaaagtaccagcctcctgagatgttgggc

SEQ ID NO: 1783 - DNA, 2316 bp, Triticum aestivum; identical to SEQ ID NO: 1782
  source 1..2316: mol_type = genomic DNA

SEQ ID NO: 1784 - DNA, 2316 bp, Triticum aestivum
  source 1..2316: mol_type = genomic DNA
atgccaaccgcccgcctgtcctccgtcttcgcctcctccttcaagtcttctttacggaagccacgagctcccgtcgccgctttggctgctgccacggagcgtgtgcgcgccagaacgctaagccagcaggacgcgcaccacctgttcgacgaattgctgagccaagccgccgccgtccccgaacgcgggctgaacaactttcttgccgcactagcccgtgctccgccctcatctgcctgcagcgatggccccggccttgccattgccctcttcaaccgcatgtcccaaggcgctggtgcacgggtggtgtcgcccacgctctgtacctattccatcctcatggactgctgctgccgcgcaggccgcccggacttggtggttgccttcttcggtcgcctcatcaggttggggttgcgcttggacgtcatcgccttcagcaatctcctcaaggggctttgcaaggccaagcgctcaaatgaggctttggatctgctgctccaccggatgcccgaactggactgtgcgcctgatgtcttctcctacagcattgtaatcaacggctgctttaaagaaggtgaagtagacaaagcgtgcaatctcttccatgagatgatccaactgggagttcaacctgatgtggccatctacacctcaattatcgatgcactaagcaagtgcggagccatggacaaggcagaagtggtccttcggcaaatggttgatcaaggcattggacccgatgtcatgacatatagcagtctgatccatggatattctactttgggtcagtggaaggcagcagttagggtactcaaagagatggtaagtgttggtgttcgaccagatgctgtcacgttgaactcatttatggattcactttgcaagcatagaaggacaaaggaagctagagatatttttgactccatggctgcaaagggccacaaacctaatattgtctcctacactattatgcttaatgggtatgttaaagaaggatgcttcgatgatatgactggtctcatcaattcgatgctacagaatggtattgtacctgatcaccatgttttcaacatactgatcaatgcatattctaaacgtgggctgatggatgaggctatgcacatgttcgaagtaatgaagcaacaaggagtaaacccagatgtagttgactatctagtagtaatggattcactttgcaaaatgggtaagatggctgctgctatggataaatttaatcagatgatcaatcaaggagtttcacctaacaaagctgtttaccaatgcctggttctgggttcttgctctcatggtgattttgtgaaagccaaggaattgatttctgaagcagttaatagaggtctctgttctaacagtgtgttcttctatcctgtaataaacgacctgtgcaaagaaggaaaggtgaaggaggcacaggatatgtttgacttcattgtaggtattggtcagcggcccgatgtgattatgtacaattcactgatggatggatattgccttgttggcaaggtggaggaagcactgagagtacttgatgctatgaagtctgctggcctccaacctgatgctattacgtatgctatacttcttaatggctactgtaaaattggcaggatcgccgatggattgagtcttttcagggaaatgtcactcagcggggttaagcccacgactattatgtacagcattatacttgatgggctgtttcgctccgggagaacagtttctgcaaaggaaaaattcaatacgatggttgaaagtggcttaccagtggacgttcgcacatacaacatagttcttcatggactttgtagaaacaattgcactggtgaagcaatagagttgttcaaaaaattatgtgcaacgaacgtgaagattaatgtcataacattcaataccatgatttctgcaatgtttaaaactaggagaattggagaagccaaggatttgtttgctactatatcagccatcgggttggtgccttctgttgtgacttacagtgtaatgacgacgaatttcataaaagaagggttgctggcggaggctgatgatatgtttttagcaatggagaaggctggctgtgctcccaactccaggctgctaaatcacgtggtcagagtgttgctggagaatggtgcagttgtaaaggctgcaacttatctcgctaaacttgatgcaaaacagctttcacttgaagcttcgacagtttcgttaattgtatctctcttctcaaggaaagggaaattaagggagcatgtaaagttgcttccggtaaagtaccagcctcctgagatgttggac

SEQ ID NO: 1785 - DNA, 2316 bp, Triticum aestivum; identical to SEQ ID NO: 1782
  source 1..2316: mol_type = genomic DNA

SEQ ID NO: 1786 - DNA, 2316 bp, Triticum aestivum; identical to SEQ ID NO: 1784
  source 1..2316: mol_type = genomic DNA

SEQ ID NO: 1787 - DNA, 2316 bp, Triticum aestivum; identical to SEQ ID NO: 1782
  source 1..2316: mol_type = genomic DNA

SEQ ID NO: 1788 - DNA, 2316 bp, Triticum aestivum
  source 1..2316: mol_type = genomic DNA
atgccaaccgcccgcctgtcctccatcttcacctcctccttcaaggctccttcacgagagcgccgagctcccctcgccgccttggctgccgccacggagcgcgtccgcgccggaacgctaagtcggcaggatgcgcaccacctgttcgacgaattgctgagccaagccgcgacagtcccagtacgcacgctcaacaattttcttgccgccctcgcccgtgcaccaccctcagctgcctgtggcaatggcccggcccttgccgtcaccctcttcaacggcatgtcccgaggcgctggtgcacgggtggtgtcgcccacgtgctgtacctattccatcctcatggactgctgctgccgtgcaggccgcccggacctggtggttgccttcttcggccgcctccttaggttggggctgcgcttgaatgtcatctccttgagcaatctcctcaaggggctctgccaggccaagcgtacaaatgaggcggtggacttgctgctccaccggacacctgaactggactgtgtgcctgatgtcttctcgtacagcatagtaatcaacggctgtttaaaagaaggtgaagtagacaaagcgtgcaatctcttccatgagatgccccaactgggagttcaacctgatgtggtgacctacacctcaattatcgacgcactaagcaaatccggagccatggtaaaggcagaagtggtccttcggcgaatggttggccaaggcattggaccaaacgtcatgacatatactagcctgatccatggatattccgcttcgggtcagtggaaggcggcagttagagtattcaaggaaatggtaagtgttggtgttctaccaaatgctgtcactttgaactcatttatggattcactttgcaagcatagaaggacaaaggaagctagagttatttttgactccatggctgcaaagggccagaaacctgatattgtctcctactctattatgcttaacgggtatgtgaaagaaggatgctttgatgatatgaccggtctcttcaattcgatgctacagaacggtgttgtacctaaccaccatattttcaacatactgatcaatgcatatgctaaacgtggactgatggatgaggctatgcacatgtttgaagtaatgaggcaacaaggagtgaacccggatgtatttggctatcaaatcataatggattcattttgtaaaatgggtaggatggatgctgctctggacaaatttaatcagatggtcaatcaaggagtttcacctaacaaagctgtttaccaatgcctggttctgggttcttgctctcatggtgattttgtgaaagccaaggaattgatttgtgaagcagttaatagaggtctctgttctaacagtgtgttcttctatcctgtaataaacgacctgtgcaaagaaggaaaggtgaaggaggcacaggatatgtttgacttcattctaggtattggtcagcggcctgatgtgattatgtacaattcactgatggatgggtattgccttgttggcaaggtggaggaagcactgagagtacttgatgctatgaagtctgctggcctccaacctactgctgttacgtatgctatacttcttaatggctactgtaaaattggcaagatcgccgatggattgagtcttttcagggaaatgtcactcagcggggttaagcccacgactattatgtacaacattatacttgatgggctgtttcgctccgggagaacagtttctgcaaaggaaaaattcaatacgatggttgaaagtggcttaccagtggacgttcgcacatacaacatagttcttcatggactttgtagaaacaattgcactggtgaagcaatagagttgttcaaaaaattatgtgcaacgaacgtgaagattaatgtcataacattcaataccatgatttctgcaatgtttaaaactaggagaattggagaagccaaggatttgtttgctactatatcagccatcgggttggtgccttctgttgtgacttacagtgtaatgatgacgaatttcataaaagaagggttgctggcagaggctgatgatatgtttttagcaatggagaaggctggctgtgctcccaactccagactgctaaatcacgtggtcagagcgttgctggaaaaaggtgcagttgtaaaggctgcaacttatctcgctaaacttgatgctaaacagctgtcagttgaagcttcaacaatttcgttaatagtatctctcttctcaggggaagggaaactaagggagcacgtagagttgcttccggtaaagtaccagcctcctgagatgttggac

SEQ ID NO: 1789 - DNA, 2316 bp, Triticum aestivum; identical to SEQ ID NO: 1788
  source 1..2316: mol_type = genomic DNA

SEQ ID NO: 1790 - DNA, 2316 bp, Triticum aestivum; identical to SEQ ID NO: 1788
  source 1..2316: mol_type = genomic DNA

SEQ ID NO: 1791 - DNA, 2316 bp, Triticum aestivum; identical to SEQ ID NO: 1788
  source 1..2316: mol_type = genomic DNA

SEQ ID NO: 1792 - DNA, 2316 bp, Triticum aestivum; identical to SEQ ID NO: 1788
  source 1..2316: mol_type = genomic DNA

SEQ ID NO: 1793 - DNA, 2316 bp, Triticum aestivum; identical to SEQ ID NO: 1788
  source 1..2316: mol_type = genomic DNA

SEQ ID NO: 1794 - DNA, 2358 bp, Triticum aestivum
  source 1..2358: mol_type = genomic DNA
atgcctcgcttctcctccaccacgccgatgtcgccactccgccgccgcctccgcgcccgccactcctcctccacctcccattcctcacgcagctgggagccccacgccgccttcgccgccgccgcggagcgtgcgcgctctggcaacctcaccccggaggacgcacaccacctgttcgacgaattgctcaggcagggcaatcctgtccaggaccgccccttgaacaaacttctctccgccctcgcccgtgctccggcgtccgcggcctgcagaaacggccctgcactcgcggtcgccctcttcagccgcatatcccaaggtgcccgccgacgggtggcggatccaacggcctgcacctacggcatcctcatggactgctgctgccgcgcacaccgcctggatctgacgctggccttcttcggcggtctccttaagacgggacttaaggcaggcgtcattcaagtttgcactcttctcaagggcctctgccgcgcaaagcgggctgatgaggctctggacgtgctgcttcacaggatgcctgagctgggctgcacccccaacgtggtggcatataccacggtcatccacggcttctttaaggaaggccaagtaggcaaggcatgcaatctgttccatggaatggcgcagcagggcgttgcgcctaatttggtgacatataactcggttattgatgcgttgtgcaaggccaaagcaatggacaaggcagagtatttccttggtcagatggttgatgatggtgtcgtacctgataatgtgacatataatagcctcatccatggatattcctcttcaggccattggaaggaggcagttagggtattcaaagagatgacaagtcggagggttacagcagatgtccatacttacaacatgtttatgacctttctttgcaaacatggaagaagcaaagaagctgcaggaatttttgataccatggctctgaagggcctgaaacctgacaacgtttcatatgctattctccttcatgggtatgccaccgtaggatgcttagttgatatgattaatctcttcaattcaatggaaagagattgtattctacctgactgtcgtatcttcaacatactgattaatgcatatgctaaatctgggaagcttgataaggctatgcttatcttcaatgaaatgcagaaacaaggagtgagtccaaatgcagtcacatattcaactgtaatagatgcattttgcaaaaagggtcagttggacgatgctatgataaagtttaatcagatgattgatacaggagtacgacagggcacagctgtttatggttctctaatccagggtttttgtacacacggcgatttggtgaaagcaaaggaattgcttactgaaatgatgaacaaaggtatatctcctcctgatattaagttcttccattcaatcatgcagaaccttggcacggaaggaagggtaatagaagcacgggatgtccttggcttgatagcgcacataggtatgaggcctaatgtttgcacatttaatatactgatcggtggatattgcctagtcggcaagatggaggatgcctcaaaaatatttgatgatatgatgtcatatggcttagaaccttctaatattacgtatggtatacttattaatggctattgcaaaaacgaaaggattaacgatgggttgattctgttcaaagaaatgttgcgcaagggacttaaacctacaacttttaattacaacgtcatactggatggattatttctgactggacgaactgttgctgcaaaggaaaagtttgatgagatggttgaatctggagtaagtgtgtgcattgatacatattcgatagttcttggtggactttgtagaaataattgtagcggcgaagcaatcacgctattccagaaattaagcacaatggatgtgaaattcaatattacaattgtcaatataatgattgatgccttctacagggttcagcgaaaccaagaagccaaggatttgtttgctgcagtatcagccaatggtttggtagctaatgtctttacctacaccataatgatgaaaaatcttataaaagaagggtcagtggaagaagctgacaatctctttttatcaatggagaagagcggctgtactgctgattcttatatgttaaatcttatcgtcagaatgttactggaaaaaggagagctagtcaaggctgggaattatatgtctaaagttgatgcaatgagctactcacttgaagctgaaaccgtttcgctgcttatctctctcttttcggggaaagggaaatatagagaacacataggattgctccctgcaaagtatcggtttcgtgaagaagcagccacagttgtg

SEQ ID NO: 1795 - DNA, 1509 bp, Triticum aestivum
  source 1..1509: mol_type = genomic DNA
atgacaagtcggagggttacagcagatgtgcatacttacaacatgtttatgacctttctttgcaaacatggaagaagcaaagaagctgcaggaatttttgataccatggctatgaagggcctgaaacctgacaacgtttcatatgctattctccttcatgggtatgccaccgaaggatgcttagttgatatgattaatctcttcaattcaatggaaagagattgtattctacctgactgtcgtatcttcaacatactgattaaagcatatgctaaatctgggaagcttgataaggctatgcttatcttcaatgaaatgcagaaacaaggagcgagtccagatgcagtcacgtattcaactgtaatagatgcattttgcaaaaagggtcagttggacgatgctatgataaagtttaatcagatgattgatacaggagtaccacagggcacagctgtttatggttctctaatccagggtttttgtacacacggcgatttggtgaaagcaaaggaattggttactgaaatgatgaacaaaggtatacctcctcctgatattaagttcttccattcaatcatgcagaacctttgcacagaaggaagggtaatagaagcacgggatgtccttggcttgatagcgcacataggtatgaagcctaatgtttgcacatttaatatactgagcggtggatattgcctagtcggcaagatggaggatgcctcaaaaatatttgatgatatgatgtcatatggcttagaaccttctaatattacgtatggtatacttattaatggctattgcaaaaacgaaaggattaacgatgggttgattctgttcaaagaaatgttgtgcaagggacttaaacctacaacttttaattacaacgtcatactggatggattatttctaactggacgaactgttgctgcaaaggaaaagtttgatgagatggttgaatctggagtaagtgtgtgcattgatacatattcgatagttcttggtggactttgtagaaataattgtagcggcgaagcaatcatgctattccagaaattaagcacaatggatgtgaaattcaatattacaattgtcaatataatgattgatgccttctacagggttcagcgaaaccaagaagccaaggatttgtttgctgcagtatcagccaatggtttggtagctaatgtctttacctacaccataatgatgaaaaatcttataaaagaagggtcagtggaagaagctgacgatctctttttatcaatggagaagagcggctgtactgctgactcttatatgttaaatcttatcgtcagaatgttactggaaaaaggagagctagtcaaggctgggaattatatgtctaaagttgatgcaatgagctactcacttgaagctgaaaccgtttcgctgcttatctctctcttttcagggaaagggaaatatagagaacacataggattgctccctgcaaagtatcagtttcgtgaagaagcagccacaattgtg

SEQ ID NO: 1796 - DNA, 2358 bp, Triticum aestivum
  source 1..2358: mol_type = genomic DNA
atgcctcgcttctcctccaccacgccgatgtcgccactccgccgccgcctccgcgcccgccactcctcctccacctcccattcctcacgcagctgggagccccacgccgccttcgccgccgccgcggagcgtgcgcgctctggcaacctcaccccggaggacgcacaccacctgttcgacgaattgctcaggcagggcaatcctgtccaggaccgccccttgaacaaacttctctccgccctcgcccgtgctccggcgtccgcggcctgcagaaacggccctgcactcgcggtcgccctcttcagccgcatatcccaaggtgcccgccgacgggtggcggagccaacggcctgcacctacggcatcctcatggactgctgctgccgcgcacaccgcctggatctgacgctggccttcttcggcggtctccttaagacgggacttaaggcaggcgtcattcaagtttgcactcttctcaagggcctctgccgcgcaaagcgggctgatgaggctctcgacgtgctgcttcacaggatgcctgagctgggctgcacccccaacgtggtggcatataccacggtcatccacggcttctttaaggaaggccaagtaggcaaggcatgcaatctgttccatggaatggcgcagcagggcgttgcgcctaatttggtgacatataactcggttattgatgcgttgtgcaaggccaaagcaatggacaaggcagagtatttccttggtcagatggttgatgatggtgtcgtacctgataatgtgacatataatagcctcatccatggatattcctcttcaggccattggaaggaggcagttagggtattcaaagagatgacaagtcggagggttacagcagatgtccatacttacaacatgtttatgacctttctttgcaaacatggaagaagcaaagaagctgcaggaatttttgataccatggctctgaagggcctgaaacctgacaacgtttcatatgctattctccttcatgggtatgccaccgaaggatgcttagttgatatgattaatctcttcaattcaatggaaagagattgtattctacctgactgtcgtatcttcaacatactgattaatgcatatgctaaatctgggaagcttgataaggctatgcttatcttcaatgaaatgcagaaacaaggagtgagtccaaatgcagtcacatattcaactgtaatagatgcattttgcaaaaagggtcagttggacgatgctatgataaagtttaatcagatgattgatacaggagtacgacagggcacagctgtttatggttctctaatccagggtttttgtacacacggcgatttggtgaaagcaaaggaattgcttactgaaatgatgaacaaaggtttatctcctcctgatattaagttcttccattcaatcatgcagaaccttggcacggaaggaagggtaatagaagcgcgggatgtccttggcttgatagcgcacataggtatgaggcctaatgtttgcacatttaatatactgatcggtggatattgcctagtcggcaagatggaggatgcctcaaaaatatttgatgatatgatgtcatatggcttagaaccttctaatattacgtatggtatacttattaatggctattgcaaaaacgaaaggattaacgatgggttgattctgttcaaagaaatgttgcgcaagggacttaaacctacaacttttaattacaacgtcatactggatggattatttctgactggacgaactgttgctgcaaaggaaaagtttgatgagatggttgaatctggagtaagtgtgtgcattgatacatattcgatagttcttggtggactttgtagaaataattgtagcggcgaagcaatcacgctattccagaaattaagcacaatggatgtgaaattcaatattacaattgtcaatataatgattgatgccttctacagggttcagcgaaaccaagaagccaaggatttgtttgctgcagtatcagccaatggtttggtagctaatgtctttacctacaccataatgatgaaaaatcttataaaagaagggtcagtggaagaagctgacaatctctttttatcaatggagaagagcggctgtactgctgattcttatatgttaaatcttatcgtcagaatgttactggaaaaaggagagctagtccaggctgggaattatatgtctaaagttgatgcaatgagctactcacttgaagctgaaaccgtttcgctgcttatctctctcttttcggggaaagggaaatatagagaacacataggattgctccctgcaaagtatcggtttcgtgaagaagcagccacagttgtg

SEQ ID NO: 1797 - DNA, 2364 bp, Triticum aestivum
  source 1..2364: mol_type = genomic DNA
atgcctcgcttctcctccaccacgccgctgtcgccactccgcctccgccgccgcctccgcgcccgccactcctcctccacctcccattcctcacgcagctgggagccccacgccgccttcgccgccgccgcggagcgtgcgcgctctggcaacctcaccccggaggacgcacaccacctgttcgacgaattgctccggcagggcaatcctgtccaggaccgccccttgaacaaacttctctccgccctcgcccgtgctccggcgtccgcgacctgcagaaacggccctgcactcgcggtcgccctcttcagccgcatatcccaaggtgcccgccgacgtgtggcagagccaacggcctgcacctacggcatcctcatggactgctgctgccgcgcacaccgcctcgatctggtgttcgctttcttcggccgtctcctcaggacgggacttaaggcaggcgtcattcaagtttgcactcttctcaagggcctctgccgcgcaaagcgggctgatgaggctctcgacgtgctgcttcacaggatgcctgagctgggctgcactcccaacgtggtggcatataccacggtcatccacggcttctttaaggaaggccaagtaggcaaggcatgcaatctgttccatggaatggcgcagcagggcgttgcgcctaatttggtgacatataactcggttattgatgcgttgtgcaaggccaaagcaatggacaaggcagagtatttccttggtcagatggttgatgatggtgtcgtacctgataatgtgacatataatagcctcatccatggatattcctcttcaggccactggaaggaggcagttagggtattcaaagagatgacaagtcggagggttacagcagatgtgcatacttacaacatgtttatgacctttctttgcaaacatggaagaagcaaagaagctgcaggaatttttgataccatggctatgaagggcctgaaacctgacaacgtttcatatgctattctccttcatgggtatgccaccgaaggatgcttagttgatatgattaatctcttcaattcaatggaaagagattgtattctacctgactgtcgtatcttcaacatactgattaatgcatatgctaaatctgggaagcttgataaggctatgcttatcttcaatgaaatgcagaaacaaggagcgaatccagatgcagtcacgtattcaactgtaatagatgcattttgcaaaaagggtcagttggacgatgctatgataaagtttaatcagatgattgatacaggagtaccacagggcacagctgtttatggttctctaatccagggtttttgtacacacggcgatttggtgaaagcaaaggaattggttactgaaatgatgaacaaaggtatacctcctcctgatattaagttcttccattcaatcatgcagaacctttgcacagaaggaagggtaatagaagcacgggatgtccttggcttgatagcgcacataggtatgaagcctaatgtttgcacatttaatatactgagcggtggatattgcctagtcggcaagatggaggatgcctcaaaaatatttgatgatatgatgtcatatggcttagaaccttctaatattacgtatggtatacttattaatggctattgcaaaaacgaaaggattaacgatgggttgattctgttcaaagaaatgttgtgcaagggacttaaacctacaacttttaattacaacgtcatactggatggattatttctaactggacgaactgttgctgcaaaggaaaagtttgatgagatggttgaatctggagtaagtgtgtgcattgatacatattcgatagttcttggtggactttgtagaaataattgtagcggcgaagcaatcatgctattccagaaattaagcacaatggatgtgaaattcaatattacaattgtcaatataatgattgatgccttctacagggttcagcgaaaccaagaagccaaggatttgtttgctgcagtatcagccaatggtttggtagctaatgtctttacctacaccataatgatgaaaaatcttataaaagaagggtcagtggaagaagctgacgatctctttttatcaatggagaagagcggctgtactgctgactcttatatgttaaatcttatcgtcagaatgttactggaaaaaggagagctagtcaaggctgggaattatatgtctaaagttgatgcaatgagctactcacttgaagctgaaaccgtttcgctgcttatctctctcttttcagggaaagggaaatatagagaacacataggattgctccctgcaaagtatcagtttcgtgaagaagcagccacaattgtg

SEQ ID NO: 1798 - DNA, 2469 bp, Triticum aestivum
  source 1..2469: mol_type = genomic DNA
atgtcccgcctccgcctccgccactgctccaccacgcccatgtcccgcctccgccgccgccgccgcctctcctcttccacctcacgacccacaccctcctggtctccccgcgccgcctttgcggcggccacggagcgcgtccgcgacggaacgctcggccctcaagacgcacaccacctgttcgacgaattgtttcagcaggccaccccggtccccgagcgccccctcaacggattccttgccgccctcacccgtgccacgccctccgaggcctgcagagacggccccgccctcgccctctccctcttcaaccgtgtctgccgagaagaagccggcatgcgggtggcgccgcccaccatcttcacctacggcgtcctcatgaactgctgctgcaacacgcgtcgtccggaacttgggctcgccttcttcggccgcctcctaaggacgggcctgaaggcagacaagaccgtcgccaacactgtcctcaagtgcctgtgctgcgctaaacggacagacgacgctgtgaaagtgctgcttcataggatgaccgagctggggtgtgtgcctgatgccttctcatacgccattgtcctgaagagcttatgtgatgataacaggagccagcaggcgctcgacctgctccggatgatggcgaaagaagaaggtgtgtgctcccctgacgtggtcacatataacacggtcatccacggcttctttaaggaaggaaaaataggcaaggcatgcaatctattccatgaaatgacgaagcaagggtttgtgcctaatgtggtgacatataactcggttatcaatgcattgtgcaaggcccgagcaatggacaatgcagagttgttccttcggcagatggttgataacggcgttcaaccgaataaagtgacatatactagcatgatccatggatattccactttgggccggtggaaagaggcgactaaactgttcagagaaatgacaagcagtggtcttataccagatattgtcacttggaactcgttcattgactccctttgcaagcatggaagaagcaaagaagctgctgaaatttttgattccatggctgccaagggccacagacctaatattgttacgtatggcattctgctccacgggtatgcaagggaaggatgctttgctgatatgatgagtctctttaattcaatggaaggcgacggtattgtagccaactgccttgttttcaccattttaattgatgcatatgctaaacgaggaatgatggatgaagctatgctcatacttactgaaatgcagggacaaggactgagtccggatgtattcacctattcaactctaatatctgcactttgcagaaaggggaggctcgctgatgctatggataagttaagtgagatgattggtacgggagtacaaccgaatacagttgtttatcactccctaattcagggtttctgtacacatggcgatctggtgaaagcaaaggagttggtttatgaaatgatgaccaaaggtattccttgtccaaacactgcattcttcagttcaatagtacacagtctatgcaaagaaggaagggttatggatgcacaccatatctttgacttggttaaagacataggggagagatctgacatcattatgtttaatacgctgattgatggatattgcctagtcggtgagatgggcaaagcattcagtgtactagatgtcatgatatcagccggcattgagcctgacatctttacatataatacacttgtcaatggttattttaagagtggaaggatcgatgatgggttgaatctgttcagagaaatgtcacataaggaaattaaacctacaactgttacatataacatcatactggatggattatttcgtgctgggagaacagttgctgccaagaaaatgctccatgagatgatcggatgtggaacaacagtgagcttgtccacatacaccataattcttagaggactttgtagaaataattgcaccgacgaagcaatcgtcatgttccagaaattacgcacaattaatgtaaagttcaatatcacaacactcaataccatgattaattcaatgtacacggttcagagaagagaagaagctaaagatttgtttgctgcaatatcagacagcgggttggtgcccaatgcctctacatacggcataatgatacgaaatcttctaaaagaaggatcagtggaagaagctgacaatatgttctcatcaatggagaagagtggttgtgctccttgctctcgtcttttaaatgataccattagaacgttattggagaagggggaaatagtcaaggccggaaattatatgtctaaagttgatggcaagagcatctcacttgaagcttcaactagttcattgttgttgtctctgttttctgggaaaggtaaatatcgtgaacaaatacaattgctccctgtaaagtaccaattctttgatggagttagt

SEQ ID NO: 1799 - DNA, 2469 bp, Triticum aestivum
  source 1..2469: mol_type = genomic DNA
atgtcccgcctccgcctccgccactgctccaccacgcccatgtcccgcctccgccgccgccgccgcctctcctcttccacctcacgacccacaccctcctggtctccccgcgccgcctttgcggcggccacggagcgcgtccgcgacggaacgctcggccctcaagacgcacaccacctgttcgacgaattgtttcagcaggccaccccggtccccgagcgccccctcaacggattccttgccgccctcacccgtgccacgccctccgaggcctgcagagacggccccgccctcgccctctccctcttcaaccgtgtctgccgagaagaagccggcatgcgggtggcgccgcccaccatcttcacctacggcgtcctcatgaactgctgctgccacacgcgtcgtccggaacttgggctcgccttcttcggccgcctcctaaggacgggcctgaaggcagacaagaccgtcgccaacactgtcctcaagtgcctgtgctgcgctaaacggacagacgacgctgtgaaagtgctgcttcataggatgaccgagctggggtgtgtgcctgatgccttctcatacgccattgtcctgaagagcttatgtgatgataacaggagccagcaggcgctcgacctgctccggatgatggcgaaagaagaaggtgtgtgctcccctgacgtggtcacatataacacggtcatccacggcttctttaaggaaggaaaaataggcaaggcatgcaatctattccatgaaatgacgaagcaagggtttgtgcctaatgtggtgacatataactcggttatcaatgcattgtgcaaggcccgagcaacggacaatgcagagttgttccttcggcagatggttgataacggcgttcaaccgaataaagtgacatatactagcatgatccatggatattccactttgggccggtggaaagaggcgactaaactgttcagagaaatgacaagcagtggtcttataccagatattgtcacttggaactcgttcattgactccctttgcaagcatggaagaagcaaagaagctgctgaaatttttgattccatggctgccaagggccacagacctaatattgttacgtatggcattctgctccacgggtatgcaagggaaggatgctttgctgatatgatgagtctctttaattcaatggaaggcgacggtattgtagccaactgccttgttttcaccattttaattgatgcatatgctaaacaaggaatgatggatgaagctatgctcatacttactgaaatgcagggacaaggactgagtccggatgtattcacctattcaactctaatatctgcactttgcagaaaggggaagctcgctgatgctatggataagttaagtgagatgattggtacgggagtacaaccgaatacagttgtttatcactccctaattcagggtttctgtacacatggcgatctggtgaaagcaaaggagttggtttatgaaatgatgaccaaaggtattccttgtccaaacactgcattcttcagttcaatagtacacagtctatgcaaagaaggaagggttatggatgcacaccatatctttgacttggttaaagacataggggagagatctgacatcattatgtttaatacgctgattgatggatattgcctagtcggtgagatgggcaaagcattcagtgtactagatgtcatgatatcagccggcattgagcctgacatctttacatataatacacttgtcaatggttattttaagagtggaaggatcgatgatgggttgaatctgttcagagaaatgtcacataaggaaattaaacctacaactgttacatataacatcatactggatggattatttcgtgctgggagaacagttgctgccaagaaaatgctccatgagatgatcggatgtggaacaacagtgagcttgtccacatacaccataattcttagaggactttgtagaaataattgcaccgacgaagcaatcgtcatgttccagaaattacgcacaattaatgtaaagttcaatatcacaacactcaataccatgattaattcaatgtacacggttcagagaagagaagaagctaaagatttgtttgctgcaatatcagacagcgggttggtgcccaatgcctctacatacggcataatgatacgaaatcttctaaaagaaggatcagtggaagaagctgacaatatgttctcatcaatggagaagagtggttgtgctccttgctctcgtcttttaaatgataccattagaacgttattggagaagggggagatagtcaaggccggaaattatatgtctaaagttgatggcaagagcatctcacttgaagcttcaactagttcattgttgttgtctctgttttctgggaaaggtaaatatcgtgaacaaatacaattgctccctgtaaagtaccaattctttgatggagttagt

SEQ ID NO: 1800 - DNA, 2469 bp, Triticum aestivum; identical to SEQ ID NO: 1798
  source 1..2469: mol_type = genomic DNA

SEQ ID NO: 1801 - DNA, 2469 bp, Triticum aestivum; identical to SEQ ID NO: 1798
  source 1..2469: mol_type = genomic DNA

SEQ ID NO: 1802 - DNA, 2469 bp, Triticum aestivum; identical to SEQ ID NO: 1799
  source 1..2469: mol_type = genomic DNA

SEQ ID NO: 1803 - DNA, 2469 bp, Triticum aestivum
  source 1..2469: mol_type = genomic DNA
atgtcccgcctccgcctccgccactgctccaccacgcccatgtcccgcctccgccgccgccgccgcctctcctcttccacctcacgacccacaccctcctggtctccccgcgccgcctttgcggcggccacggagcgcgtccgcgacggaacgctcggccctcaagacgcacaccacctgttcgacgaattgtttcagcaggccaccccggtccccgagcgccccctcaacggattccttgccgccctcacccgtgccacgccctccgaggcctgcagagacggccccgccctcgccctctccctcttcaaccgtgtctgccgagaagaagccggcatgcgggtggcgccgcccaccatcttcacctacggcgtcctcatgaactgctgctgccacacgcgtcgtccggaacttgggctcgccttcttcggccgcctcctaaggacgggcctgaaggcagacaagaccgtcgccaacactgtcctcaagtgcctgtgctgcgctaaacggacagacgacgctgtgaaagtgctgcttcataggatgaccgagctggggtgtgtgcctgatgccttctcatacgccattgtcctgaagagcttatgtgatgataacaggagccagcaggcgctcgacctgctccggatgatggcgaaagaagaaggtgtgtgctcccctgacgtggtcacatataacacggtcatccacggcttctttaaggaaggaaaaataggcaaggcatgcaatctattccatgaaatgacgaagcaagggtttgtgcctaatgtggtgacatataactcggttatcaatgcattgtgcaaggcccgagcaacggacaatgcagagttgttccttcggcagatggttgataacggcgttcaaccgaataaagtgacatatactagcatgatccatggatattccactttgggccggtggaaagaggcgactaaactgttcagagaaatgacaagcagtggtcttataccagatattgtcacttggaactcgttcattgactccctttgcaagcatggaagaagcaaagaagctgctgaaatttttgattccatggctgccaagggccacagacctaatattgttacgtatggcattctgctccacgggtatgcaagggaaggatgctttgctgatatgatgagtctctttaattcaatggaaggcgacggtattgtagccaactgccttgttttcaccattttaattgatgcatatgctaaacgaggaatgatggatgaagctatgctcatacttactgaaatgcagggacaaggactgagtccggatgtattcacctattcaactctaatatctgcactttgcagaaaggggaagctcgctgatgctatggataagttaagtgagatgattggtacgggagtacaaccgaatacagttgtttatcactccctaattcagggtttctgtacacatggcgatctggtgaaagcaaaggagttggtttatgaaatgatgaccaaaggtattccttgtccaaacactgcattcttcagttcaatagtacacagtctatgcaaagaaggaagggttatggatgcacaccatatctttgacttggttaaagacataggggagagatctgacatcattatgtttaatacgctgattgatggatattgcctagtcggtgagatgggcaaagcattcagtgtactagatgtcatgatatcagccggcattgagcctgacatctttacatataatacacttgtcaatggttattttaagagtggaaggatcgatgatgggttgaatctgttcagagaaatgtcacataaggaaattaaacctacaactgttacatataacatcatactggatggattatttcgtgctgggagaacagttgctgccaagaaaatgctccatgagatgatcggatgtggaacaacagtgagcttgtccacatacaccataattcttagaggactttgtagaaataattgcaccgacgaagcaatcgtcatgttccagaaattacgcacaattaatgtaaagttcaatatcacaacactcaataccatgattaattcaatgtacacggttcagagaagagaagaagctaaagatttgtttgctgcaatatcagacagcgggttggtgcccaatgcctctacatacggcataatgatacgaaatcttctaaaagaaggatcagtggaagaagctgacaatatgttctcatcaatggagaagagtggttgtgctccttgctctcgtcttttaaatgataccattagaacgttattggagaagggggagatagtcaaggccggaaattatatgtctaaagttgatggcaagagcatctcacttgaagcttcaactagttcattgttgttgtctctgttttctgggaaaggtaaatatcgtgaacaaatacaattgctccctgtaaagtaccaattctttgatggagttagt

SEQ ID NO: 1804 - DNA, 2457 bp, Triticum aestivum
  source 1..2457: mol_type = genomic DNA
atgccccgcctccgtcgcttctccaccatgccgatgctccacctcctccgccgcagctcctcctccacctccacctcgccgcccttgcgttcctggtctccccacgccgcctttgccgccgccacggagcgtgtccgtgccggggcgctcagccctgaagacgcgcaccacctgttcgacgaattgctacggcaggccaccccggtccccgagcgctccctcaacggcttccttgccgccctcgcccgtgcgcccgcctcggccgcctgcattagagatggccccgcccttgccgtcgctctcttcaaccgcgtgtgccgagaagaagccggcctgcaggtggcagcgcccacagtttgcacctacaacatcctcatgggctgctgctgccgcgtgcatcgcccggacctagggcttgccttctttggtcgtctcctcaggacaggcctgaagacagaacagatcactgccaacaccttcctcaagtgcctctgctacgccaaacggacggaagaggctgtgaacatgctgcttcatgggatgtccgagctcggctgtgtgccggatgcaatctcatactccattgttctgaagagcttatgcgagaatagcatgagtcagcgggcattcgacctgctccacagcgggcactcgacctgctctttcagtgtggtggcatatagcacagtcatccatggctttttcaaagaaggcaaaacaggcaaggcatgcaatctattccatgaaatgatacatcaaggggttgatcctgatgtggtgacgtgcaactcgatcattaatgcattgtgcaaggccagagcaatggacaaggcagagctagtccttcggcagatggtcgataaaggtgttcagcccaatacagtgacttataattgcatgattcatggatattccacgtcagggcggttgaaagaggctgttaaaatgttgacagaaatgacaagccgtggtcttataccagatattgttacttacaattcgttgatgacttcccttagcaagcatcgaagaagcaaagaagcggcagaaatattttattccatgactgccaagggccacaaaccgaatgctgcctcgcaccgtattttgcttaatgggtatgccactgagggatgctttgctgatatgattgatctcttcaactcaatggaaagcaatggttttgtagccgactgccatgttttcaccatattaattgatgcatatgctaaacgtggaatgatggatgaagctatgctcatatttactgaaatgcgggaaaaaggagtgagtcccgatgtattcacctattacactgtaatagccgcactttgcagattgggtaggctggccgatgctatggacaggttcaatgagatgactgatatgggtgttcagccgaacacagttgtttatcactccctaattcagggtttttgtatgcttggtgatttggttaaagctaaggagttggtgtctgaaatgatgaacaaaggtattcctcgtcctgacattgcgttcttcagttcaataataaacagtctatgcaaagaaggaagagttatggatgcacaagatatctttgaattggttataagcatagatgagagacctgacgtcattacatttaactcactgattgatggatatggcttaattggccagatggataaagcatttggagtgcttgatgccatggtatcagctggcattgagcctaatgttgttacgtatagttcacttcttgatggctattgtagaaatggaaggatcgatgatgctttgattctattcagagaaatgccgcgcaagagaattaaacctaacactgttacatatggcatcatactgcatgggttgttccgtgctgggagaactgttgctgcaaggaaaatgttcgatgagatgatcgaagggggtataccagtgagcatttccatatacaatataatacttggaggtctttgtagaaataattgtgcagacgaagcaatcacactatttcagaaattaggagcaatgaatgtcaagttcgatattataacactcaataccatgattaatgcaatgttcaaggttcggagaagagaagaagctaatgatttgtttgctgcaatatcagccagtgggttggtgcctaatgcttctacttacggcataatgatagaaaatattctaaaagaaggatcagtggaagaagttgacaatatgttttcatcaatggagaagagtggttgtgctcccagctctcgtcttataaattgtatcatcagaatgttgttggaaaaaggtgagattgccagggctgggaattatttatctaaagttgatgggaagatcatctcacttgaagcttcaactacttctttgttgttgtctctcttttcaagggaagggaaatatcgggaaaacattgaattgcttcctgcaaagtatcaatttttcattggatttggt

SEQ ID NO: 1805 - DNA, 1710 bp, Triticum aestivum
  source 1..1710: mol_type = genomic DNA
atgatacatcaaggggttgatcctgatgtggtgacgtacaactcgatcattgatggattgtgcaaggccagagcaatggacaaggcagagctagtccttcggcagatggtcgataaaggtgttcaacccaatacagtgacatataattgcatgattcatggatattccacatcagggcggttgaaagaggctgttaaaatgttgacagaaatgacaagccgtggtcttataccagatattgttacttacaattcgttgatgacttccctttgcaagcatggaagaagcaaagaagtggcagaaatattttattccatgactgccaagggccacaaaccgaatgctgcctcgtaccgtattttgcttaatgggtatgccactgagggatgctttgctgatatgattgatctcttcaactcaagggaaagcaatagttttgtatccgactgccatgttttcaccatattaattgatgcatatgctaaacgtggaatgatggatgaagctatgctcatatttactgaaatgcgggaaaaaggagtgagtcccgatgtattcacctattacactgtaatagccgcactttgcagattgggtaggctggccgatgctatggacaggttcaatgagatgactgatatgggtgttcagccgaacacagttgtttatcactccctaattcagggtttttgtatgcttggtgatttggttaaagctaaggagttggtgtctgaaatgatgaacaaaggtattcctcgtcctgacattgcattcttcagttcaataataaacagtctatgcaaagaaggaagagttatggatgcacaagatatctttgaattggttataagcatagatgagagacctgacgtcattacatttaactcactgattgatggatatggcttaattggccagatggataaagcatttggagtgcttgatgccatggtatcagctggcattgagcctaatgttgttacgtatagttcacttcttgatggctattgtagaaatggaaggatcgatgatgctttgattctattcagagaaatgccgcgcaagagaattaaacctaacactgttacatatggcatcatactggatgggttgttccgtgctgggagaactgttgctgcaaggaaaatgttcgatgagatgatcgaagggggtataccagtgagcatttccatatacaatataatacttggaggtctttgtagaaataattgtgcagacgaagcaatcacactattccagaaattaggagcaatgaatgtcaagttctatattataacactcaataccatgattaatgcaatgttcaaggttcggagaagagaagaagctaacgatttgtttgctgcaatatcagccagtgggttggtgcctaatgcttctacttacggcataatgatagaaaatattctaaaagaaggatcagtggaagaagttgacaatatgttttcatcaatggagaagagtgattgtgctcccagctctcgtcttataaattatatcatcagaatgttgttggaaaaaggtgagattgccagggccgggaattatttatctaaagttgatgggaagatcatctcacttgaagcttcaactacttctttgttgttgtctctcttttcaagggaagggaaatatcgggaaaacattgaattgcttcctgcaaagtatcaatttttcaatggatttggt

SEQ ID NO: 1806 - DNA, 1710 bp, Triticum aestivum; identical to SEQ ID NO: 1805
  source 1..1710: mol_type = genomic DNA

SEQ ID NO: 1807 - DNA, 1191 bp, Triticum aestivum
  source 1..1191: mol_type = genomic DNA
atgatacatcaaggggttgatcctgatgtggtgacgtacaactcgatcattgatggattgtgcaaggccagagcaatggacaaggcagagctagtccttcggcagatggtcgataaaggtgttcaacccaatacagtgacatataattgcatgattcatggatattccacatcagggcggttgaaagaggctgttaaaatgttgacagaaatgacaagccgtggtcttataccagatattgttacttacaattcgttgatgacttccctttgcaagcatggaagaagcaaagaagcggcagaaatattttattccatgactgccaagggccacaaaccgaatgctgcctcgtaccgtattttgcttaatgggtatgccactgagggatgctttgctgatatgattgatctcttcaactcaatgaaaagcaatggttttgtagctgactgccatgttttcaccatattaattgatgcatatgctaaacgtggaatgatggatgaagctatgctcatatttactgaaatgcgggaaaaaggagtgagtcccgatgtattcacctattacactgtaatagccgcactttgcagattgggtaggctggccgatgctatggacaggttcaatgagatgactgatatgggtgttcagccgaacacagttgtttatcactccctaattcagggtttttgtatgcttggtgatttggttaaagctaaggagttggtgtctgaaatgatgaacaaaggtattcctcgtcctgacattgcattcttcagttcaataataaacagtctatgcaaagaaggaagagttatggatgcacaagatatctttgaattggttataagcatagatgagagacctgacgtcattacatttaactcactgattgatggatatggcttaattggccagatggataaagcatttggagtgcttgatgccatggtatcagctggcattgagcctaatgttgttacgtatagttcacttcttgatggctattgtagaaatggaaggatcgatgatgctttgattctattcagagaaatgccgcgcaagagaattaaacctaacactgttacatatggcatcatactggatgggttgttcagtgctgggagaactgttgctgcaaggaaaatgttcgatgagatgatcgaagggggtaagcccagctcacgctgc

SEQ ID NO: 1808 - DNA, 2457 bp, Triticum aestivum
  source 1..2457: mol_type = genomic DNA
atgccccgcctccgtcgcttctccaccatgccgatgctccacctcctccgccgcagctcctcctccacctccacctcgccgcccttgcgttcctggtctccccacgccgcctttgccgccgccacggagcgtgtccgtgccggggcgctcagccctgaagacgcgcaccacctgttcgacgaattgctacggcaggccaccccggtccccgagcgctccctcaacggcttccttgccgccctcgcccgtgcgcccgcctcggccgcctgcattagagatggccccgcccttgccgtcgctctcttcaaccgcgtgtgccgagaagaagccggcctgcaggtggcagcgcccacagtttgcacctacaacatcctcatgggctgctgctgccgcgtgcatcgcccggacctagggcttgccttctttggtcgtctcctcaggacatgcctgaagacagaacagatcactgccaacaccttcctcaagtgcctctgctacgccaaacggacggaagaggctgtgaacatgctgcttcatgggatgtccgagctcggctgtgtgccggatgcaatctcatactccattgttctgaagagcttatgcgagaatagcatgagtcagcgggcattcgacctgctccacagcgggcactcgacctgctctttcagtgtggtggcatatagcacagtcatccatggcttttttaaagaaggcaaaacaggcaaggcatgcaatctattccatgaaatgatacatcaaggggttgatcctgatgtggtgacgtacaactcgatcattaatgcattgtgcaaggccagagcaatggacaaggcagagctagtccttcggcagatggtcgataaaggtgttcagcccaatacagtgacttataattgcatgattcatggatattccacgtcagggcggttgaaagaggctgttaaaatgttgacagaaatgacaagccgtggtcttataccagatattgttacttacaattcgttgatgacttcccttagcaagcatcgaagaagcaaagaagcggcagaaatattttattccatgactgccaagggccacaaaccgaatgctgcctcgtaccgtattttgcttaatgggtatgccactgagggatgctttgctgatatgattgatctcttcaactcaatggaaagcaatggttttgtagccgactgccatgttttcaccatattaattgatgcatatgctaaacgtggaatgatggatgaagctatgctcatatttactgaaatgcgggaaaaaggagtgagtcccgatgtattcacctattacactgtaatagccgcactttgcagattgggtaggctggccgatgctatggacaggttcaatgagatgactgatatgggtgttcagccgaacacagttgtttatcactccctaattcagggtttttgtatgcttggtgatttggttaaagctaaggagttggtgtctgaaatgatgaacaaaggtattcctcgtcctgacattgcgttcttcagttcaataataaacagtctatgcaaagaaggaagagttatggatgcacaagatatctttgaattggttataagcatagatgagagacctgacgtcattacatttaactcactgattgatggatatggcttaattggccagatggataaagcatttggagtgcttgatgccatggtatcagctggcattgagcctaatgttgttacgtatagttcacttcttgatggctattgtagaaatggaaggatcgatgatgctttgattctattcagagaaatgccgcgcaagagaattaaacctaacactgttacatatggcatcatactgcatgggttgttccgtgctgggagaactgttgctgcaaggaaaatgttcgatgagatgatcgaagggggtataccagtgagcatttccatatacaatataatacttggaggtctttgtagaaataattgtgcagacgaagcaatcacactatttcagaaattaggagcaatgaatgtcaagttcgatattataacactcaataccatgattaatgcaatgttcaaggttcggagaagagaagaagctaatgatttgtttgctgcaatatcagccagtgggttggtgcctaatgcttctacttacggcataatgatagaaaatattctaaaagaaggatcagtggaagaagttgacaatatgttttcatcaatggagaagagtggttgtgctcccagctctcgtcttataaattgtatcatcagaatgttgttgggaaaaggtgagattgccagggccgggaattatttatctaaagttgatgggaagatcatctcacttgaagcttcaactacttctttgttgttgtctctcttttcaagggaagggaaatatcgggaaaacattgaattgcttcctgcaaagtatcaatttttcattggatttggt

SEQ ID NO: 1809 - DNA, 1710 bp, Triticum aestivum
  source 1..1710: mol_type = genomic DNA
atgatacatcaaggggttgatcctgatgtggtgacgtacaactcgatcattgatggattgtgcaaggccagagcaatggacaaggcagagctagtccttcggcagatggtcgataaaggtgttcaacccaatacagtgacatataattgcatgattcatggatattccacatcagggcggttgaaagaggctgttaaaatgttgacagaaatgacaagccgtggtcttataccagatattgttacttacaattcgttgatgacttccctttgcaagcatggaagaagcaaagaagcggcagaaatattttattccatgactgccaagggccacaaaccgaatgctgcctcgtaccgtattttgcttaatgggtatgccactgagggatgctttgctgatatgattgatctcttcaactcaatgaaaagcaatggttttgtagctgactgccatgttttcaccatattaattgatgcatatgctaaacgtggaatgatggatgaagctatgctcatatttactgaaatgcgggaaaaaggagtgagtcccgatgtattcacctattacactgtaatagccgcactttgcagattgggtaggctggccgatgctatggacaggttcaatgagatgactgatatgggtgttcagccgaacacagttgtttatcactccctaattcagggtttttgtatgcttggtgatttggttaaagctaaggagttggtgtctgaaatgatgaacaaaggtattcctcgtcctgacattgcattcttcagttcaataataaacagtctatgcaaagaaggaagagttatggatgcacaagatatctttgaattggttataagcatagatgagagacctgacgtcattacatttaactcactgattgatggatatggcttaattggccagatggataaagcatttggagtgcttgatgccatggtatcagctggcattgagcctaatgttgttacgtatagttcacttcttgatggctattgtagaaatggaaggatcgatgatgctttgattctattcagagaaatgccgcgcaagagaattaaacctaacactgttacatatggcatcatactggatgggttgttccgtgctgggagaactgttgctgcaaggaaaatgttcgatgagatgatcgaagggggtataccagtgagcatttccatatacaatataatacttggaggtctttatagaaataattgtgcagacgaagcaatcacactattccagaaattaggagcaatgaatgtcaagttctatattataacactcaataccatgattaatgcaatgttcaaggttcggagaagagaagaagctaacgatttgtttgctgcaatatcagccagtgggttggtgcctaatgcttctacttacggcataatgatagaaaatattctaaaagaaggatcagtggaagaagttgacaatatgttttcatcaatggagaagagtgattgtgctcccagctctcgtcttataaattatatcatcagaatgttgttggaaaaaggtgagattgccagggccgggaattatttatctaaagttgatgggaagatcatctcacttgaagcttcaactacttctttgttgttgtctctcttttcaagggaagggaaatatcgggaaaacattgaattgcttcctgcaaagtatcaatttttcaatggatttggt

SEQ ID NO: 1810 - DNA, 1710 bp, Triticum aestivum; identical to SEQ ID NO: 1809
  source 1..1710: mol_type = genomic DNA

SEQ ID NO: 1811 - DNA, 2457 bp, Triticum aestivum; identical to SEQ ID NO: 1804
  source 1..2457: mol_type = genomic DNA

SEQ ID NO: 1812 - DNA, 2457 bp, Triticum aestivum
  source 1..2457: mol_type = genomic DNA
atgccccgcctccgtcgcttctccaccatgccgatgctccacctcctccgccgcagctcctcctccacctccacctcgccgcccttgcgttcctggtctccccacgccgcctttgccgccgccacggagcgtgtccgtgccggggcgctcagccctgaagacgcgcaccacctgttcgacgaattgctacggcaggccaccccggtccccgagcgctccctcaacggcttccttgccgccctcgcccgtgcgcccgcctcggccgcctgcattagatatggccccgcccttgccgtcgctctcttcaaccgcgtgtgccgagaagaagccggcctgcaggtggcagcgcccacagtttgcacctacaacatcctcatgggctgctgctgccgcgcgcatcgcccggacctagggcttgccttctttggtcgtctcctcaggacaggcctgaagacagaacagatcactgccaacaccttcctcaagtgcctctgctacgccaaacggacggaagaggctgtgaacgtgctgcttcatgggatgtccgagctcggctgtgtgccggatgcaatctcatactccattgttctgaagagcttatgcgagaatagcatgagtcagcgggcactcgacctgctccacagcgggcactcgacctgctctttcagtgtggtggcatatagcacagtcatccatggcttttttaaagaaggcaaaacaggcaaggcatgcaatctattccatgaaatgatacatcaaggggttgatcctgatgtggtgacgtacaactcgatcattaatgcattgtgcaaggccagagcaatggacaaggcagagctagtccttcggcagatggtcgataaaggtgttcagcccaatacagtgacttataattgcatgattcatggatattccacgtcagggcggttgaaagaggctgttaaaatgttgacagaaatgacaagccgtggtcttataccagatattgttacttacaattcgttgatgacttccctttgcaagcatcgaagaagcaaagaagcggcagaaatattttattccatgactgccaagggccacaaaccgaatgctgcctcgtaccgtattttgcttaatgggtatgccactgagggatgctttgctgatatgattgatctcttcaactcaatggaaagcaatggttttgtagccgactgccatgttttcaccatattaattgatgcatatgctaaacgtggaatgatggatgaagctatgctcatatttactgaaatgcgggaaaaaggagtgagtcccgatgtattcacctattacactgtaatagccgcactttgcagattgggtaggctggccgatgctatggacaggttcaatgagatgactgatatgggtgttcagccgaacacagttgtttatcactccctaattcagggtttttgtatgcttggtgatttggttaaagctaaggagttggtgtctgaaatgatgaacaaaggtattcctcgtcctgacattgcgttcttcagttcaataataaacagtctatgcaaagaaggaagagttatggatgcacaagatatctttgaattggttataagcatagatgagagacctgacgtcattacatttaactcactgattgatggatatggcttaattggccagatggataaagcatttggagtgcttgatgccatggtatcagctggcattgagcctaatgttgttacgtatagttcacttcttgatggctattgtagaaatggaaggatcgatgatgctttgattctattcagagaaatgccgcgcaagagaattaaacctaacactgttacatatggcatcatactgcatgggttgttccgtgctgggagaactgttgctgcaaggaaaatgttcgatgagatgatcgaagggggtataccagtgagcatttccatatacaatataatacttggaggtctttgtagaaataattgtgcagacgaagcaatcacactatttcagaaattaggagcaatgaatgtcaagttcgatattataacactcaataccatgattaatgcaatgttcaaggttcggagaagagaagaagctaatgatttgtttgctgcaatatcagccagtgggttggtgcctaatgcttctacttacggcataatgatagaaaatattctaaaagaaggatcagtggaagaagttgacaatatgttttcatcaatggagaagagtggttgtgctcccagctctcgtcttataaattgtatcatcagaatgttgttggaaaaaggtgagattgccagggccgggaattatttatctaaagttgatgggaagatcatctcacttgaagcttcaactacttctttgttgttgtctctcttttcaagggaagggaaatatcgggaaaacattgaattgcttcctgcaaagtatcaatttttcattggatttggt

SEQ ID NO: 1813 - DNA, 2457 bp, Triticum aestivum; identical to SEQ ID NO: 1804
  source 1..2457: mol_type = genomic DNA

SEQ ID NO: 1814 - DNA, 2457 bp, Triticum aestivum; identical to SEQ ID NO: 1804
  source 1..2457: mol_type = genomic DNA

SEQ ID NO: 1815 - DNA, 1395 bp, Triticum aestivum
  misc_feature 50: note = n is a, c, g, or t
  misc_feature 52..56: note = n is a, c, g, or t
  misc_feature 59: note = n is a, c, g, or t
  misc_feature 61: note = n is a, c, g, or t
  source 1..1395: mol_type = genomic DNA
atgactgccaagggccacaaaccgaatgctgcctcgcaccgtattttgcntnnnnngyntnycactgagggatgctttgctgatatgattgatctcttcaactcaatggaaagcaatggttttgtagccgactgccatgttttcaccatattaattgatgcatatgctaaacgtggaatgatggatgaagctatgctcatatttactgaaatgcgggaaaaaggagtgagtcccgatgtattcacctattacactgtaatagccgcactttgcagattgggtaggctggccgatgctatggacaggttcaatgagatgactgatatgggtgttcagccgaacacagttgtttatcactccctaattcagggtttttgtatgcttggtgatttggttaaagctaaggagttggtgtctgaaatgatgaacaaaggtattcctcgtcctgacattgcrttcttcagttcaataataaacagtctatgcaaagaaggaagagttatggatgcacaagatatctttgaattggttataagcatagatgagagacctgacgtcattacatttaactcactgattgatggatatggcttaattggccagatggataaagcatttggagtgcttgatgccatggtatcagctggcattgagcctaatgttgttacgtatagttcacttcttgatggctattgtagaaatggaaggatcgatgatgctttgattctattcagagaaatgccgcgcaagagaattaaacctaacactgttacatatggcatcatactggatgggttgttccgtgctgggagaactgttgctgcaaggaaaatgttcgatgagatgatcgaagggggtataccagtgagcatttccatatacaatataatacttggaggtctttatagaaataattgtgcagacgaagcaatcacactattccagaaattaggagcaatgaatgtcaagttctatattataacactcaataccatgattaatgcaatgttcaaggttcggagaagagaagaagctaacgatttgtttgctgcaatatcagccagtgggttggtgcctaatgcttctacttacggcataatgatagaaaatattctaaaagaaggatcagtggaagaagttgacaatatgttttcatcaatggagaagagtgattgtgctcccagctctcgtcttataaattatatcatcagaatgttgttggaaaaaggtgagattgccagggccgggaattatttatctaaagttgatgggaagatcatctcacttgaagcttcaactacttctttgttgttgtctctcttttcaagggaagggaaatatcgggaaaacattgaattgcttcctgcaaagtatcaatttttcaatggatttggt

SEQ ID NO: 1816 - DNA, 1710 bp, Triticum aestivum; identical to SEQ ID NO: 1805
  source 1..1710: mol_type = genomic DNA

SEQ ID NO: 1817 - DNA, 2457 bp, Triticum aestivum; identical to SEQ ID NO: 1804
  source 1..2457: mol_type = genomic DNA

SEQ ID NO: 1818 - DNA, 1506 bp, Triticum aestivum
  source 1..1506: mol_type = genomic DNA
atgttggacatcggcgtcgtgaaggatcggcggaggcggaggcggaacaacggggcgaggaatgataccggggaccggaattgctgctgcatggaaacaatgatgccggggcgctccctcaacggcttcctcgccgccctcgcacgtgctacgtcctctgccgcccccgcctgcatcagagatggtcctgtcctcgtcgtcgccctcttcaaccgcttgtgccgagaacaagccgtcgtgcgggtggcgcctctcacagtccacacctacggcatcctcatggactgctgctgccgcacgtctcgcccggacctaggtcttgccttcttcggtcgcctcctcaggacaggcctcaagacaaatgagatcgttgccaccaccttcctcaagtgcctctgctacgcaaaacggacggatgaggctgtgaacgtgctgcttcataggatgcccgagctcggctgtgtgcctgacgccttcgcatactccactgttctgaagagcttatgcgacaatagcatgagtcagcaggggctcgacctgctccatatgatggcgaaagaaggaggtggctgctcccccaacgtggtggcgtatagcacagtcatccatggcttctttaaggaaggtgaaataggcaaggcatgcaatctgttccatgaaatgatgcagcaaggtgttgagcccaatgtgtggacatatagttcaatcattgatgcattgtgcaaggccagagcaatggacaaggcagagctagtgcttcagcagatggttaacaaaggtgttcaacccaataatgtgacatatagttgcatgatccatggatattccacatctgggaggtggaaagaggctgctaaattgctcagagaaatgaaaagccggggccttatactagatattgtcactcgcaactcgttcctggcctccctttgcaagcatgggaggagcaaggaagctgcagaatttcttgattccatgactgccaagggccacaaaccagatatcgtatcatactgtattttgcttcatgggtatggtactgaaggatgcttcgctgatatgattgatgtcttttattcaatggaaagcaacggtattgcagctgactgccatgttttcaacatattaattaatggatatgcaaaacgtggaatgacagaagaagctatgctgatatttactgaaatgcggggacaaggagtaagtccagatgtagtcacctattccattgtaatagcagcactttccagaatgggcaagctgaccgatgctattgagaaattcaatgagatgactgccttggaagtacagccggacacaactgtttatcactcactgattcagggttgttgcatagacggtgatttggttaaagctaaggagctgatgtttgaaatgatgaacggtggtattcctcggcctaacattgtgttcttcaattcagtaataaacagtctgtgcaaagaaggaagggttatggatgcacatgatgtcttagacttgtta

SEQ ID NO: 1819 - DNA, 792 bp, Triticum aestivum
  source 1..792: mol_type = genomic DNA
atggataaagcattcaaaatacttgatgtcatggaatcagttggtgttgagcctaatgttgttacttatagtacacttcttgatggctattctaaaaacagaaggattgatgatgctttgactttgtttagagaaatgccgcgtaagagaattaaacctgacactgttacatatggcatcatgttggatgggttgtttcgtgctgggagaactgtcgctgcaatggaaatgttccatgagatgattgaaagtggaacaacagtggacattctcatatacaatataaaacttggaggtctttgtagacataattgtgtagatgaagcgattgcactgttccagaaattgcgagcaatgaatgtgaagttcaatattgaaatactcaataccatgattaatgcaatgtacaaggttcaaagaaaggaagaagcaaaggaattgtttgctacaatatcagccaatgggttggtgcccaatgaatctacttatgcagtaatgataagaaatcttctgaaagacggagcagtggaagatgctgacaatatgttttcatcaatggacaacagtggtatcgttcccagttcccgtcttataaatgatatcatcagaatgttgttggaaaaaggtgagatagccaaggctggaaattatttgtctaaagttgatgggaagagtatctcacttgaagcttcaactacctcattgatgttgtctctcttttcaaggaaagggaaacaccaggaggacattaagttgctccctgcaaagtatcaaatttttgatggatttagt

SEQ ID NO: 1820 - DNA, 2466 bp, Triticum aestivum
  source 1..2466: mol_type = genomic DNA
atggccgaaattcggccgaaatccacattttgcggccgaaaatcaaaacacacggtgggggtggaggtggaggaggagctgcggcggaggaggcggatgttggacatcggcgtcgtgaaggatcggcggaggcggaggcggaacaacggggcgaggaatgataccggggaccggaattgctgctgcatggaaacaatgatgccggggcgctccctcaacggcttcctcgccgccctcgcacgtgctacgtcctctgccgcccccgcctgcatcagagatggtcctgtcctcgtcgtcgccctcttcaaccgcttgtgccgagaacaagccgtcgtgcgggtggcgcctctcacagtccacacctacggcatcctcatggactgctgctgccgcacgtctcgcccggacctaggtcttgccttcttcggtcgcctcctcaggacaggcctcaagacaaacgagatcaccgccaccaccttcctcaagtgcctctgctacgcaaaacggacggatgaggctgtgaacgtgctgcttcataggatgcccgagctcggctgtgtgcctgacgccttcgcatactccactgttctgaagagcttatgcgacaatagcatgagtcagcaggggctcgacctgctccatatgatggcgaaagaaggaggtggctgctcccccaacgtggtggcgtatagcacagtcatccatggcttctttaaggaaggtgaaataggcaaggcatgcaatctgttccatgaaatgatgcagcaaggtgttgagcccaatgtgtggacatatagttcaatcattgatgcattgtgcaaggccagagcaatggacaaggcagagctagtgcttcagcagatggttaacaaaggtgttcaacccaataatgtgacatatagttgcatgatccatggatattccacatctgggaggtggaaagaggctgctaaattgctcagagaaatgaaaagccggggccttatactagatattgtcactcgcaactcgttcctggcctccctttgcaagcatgggagaagcaaggaagctgcagaatttcttgattccatgactgccaagggccacaaaccagatatcgtatcatactgtattttgcttcatgggtatggtactgaaggatgcttcgctgatatgattgatgtcttttattcaatggaaagcaacggtattgcagctgactgccatgttttcaacatattaattaatggatatgcaaaacgtggaatgacagaagaagctatgctgatatttactgaaatgcggggacaaggagtaagtccagatgtagtcacctattccattgtaatagcagcactttccagaatgggcaagctgaccgatgctattgagaaattcaatgagatgactgccttggaagtacagccggacacaactgtttatcactcactgattcagggttgttgcatagacggtgatttggttaaagctaaggagctgatgtttgaaatgatgaacggtggtattcctcggcctaacattgtgttcttcaattcagtaataaacagtctgtgcaaagaaggaagggttatggatgcacatgatgtcttagacttggttataggcataggtgagaggcctaatgtcattacatttaattcactgattgacggatattgcttagtcgggaacatggataaagcattcaaaatacttgatgtcatggaatcagttggtgttgagcctaatgttgttacttatagtacacttcttgatggctattctaaaaacagaaggattgatgatgctttgactttgtttagagaaatgccgcgtaagagaattaaacctgacactgttacatatggcatcatgttggatgggttgtttcgtgctgggagaactgtcgctgcaatggaaatgttccatgagatgattgaaagtggaacaacagtggacattctcatatacaatataaaacttggaggtctttgtagaaataattgtgtagatgaagcgattgcactgttccagaaattgcgagcaatgaatgtgaagttcaatattgaaatactcaataccatgattaatgcaatgtacaaggttcaaagaaaggaagaagcaaaggaattgtttgctacaatatcagccaatgggttggtgcccaatgaatctacttatgcagtagtgataagaaatcttctaaaaggcggagcagtagaagatgctgacaatatgttttcatcaaaagacaacagtggcatcgttcccagttcccgtcttataaatgatatcatcagaatgttgttggaaaaaggtgagatagccaaggctggcaattatttgtctaaagttgatgggaagagtatctcacttgaagcttcaactgcctcattgatgttgtctctcttttcaaggaaagggaaacatcaggaggatattaagttgctccctgcaaagtatcagttttttgatgggtttggt

SEQ ID NO: 1821 - DNA, 1506 bp, Triticum aestivum; identical to SEQ ID NO: 1818
  source 1..1506: mol_type = genomic DNA

SEQ ID NO: 1822 - DNA, 792 bp, Triticum aestivum; identical to SEQ ID NO: 1819
  source 1..792: mol_type = genomic DNA

SEQ ID NO: 1823 - DNA, 2466 bp, Triticum aestivum; identical to SEQ ID NO: 1820
  source 1..2466: mol_type = genomic DNA

SEQ ID NO: 1824 - DNA, 2466 bp, Triticum aestivum; identical to SEQ ID NO: 1820
  source 1..2466: mol_type = genomic DNA

SEQ ID NO: 1825 - DNA, 1506 bp, Triticum aestivum; identical to SEQ ID NO: 1818
  source 1..1506: mol_type = genomic DNA

SEQ ID NO: 1826 - DNA, 792 bp, Triticum aestivum; identical to SEQ ID NO: 1819
  source 1..792: mol_type = genomic DNA

SEQ ID NO: 1827 - DNA, 1176 bp, Triticum aestivum
  source 1..1176: mol_type = genomic DNA
atgagtcagcaggggctcgacctgctccatatgatggcgaaagaaggaggtggctgctcccccaacgtggtggcgtatagcacagtcatccatggcttctttaaggaaggtgaaataggcaaggcatgcaatctgttccatgaaatgatgcagcaaggtgttgagcccaatgtgtggacatatagttcaatcattgatgcattgtgcaaggccagagcaatggacaaggcagagctagtgcttcagcagatggttaacaaaggtgttcaacccaataatgtgacatatagttgcatgatccatggatattccacatctgggaggtggaaagaggctgctaaattgctcagagaaatgaaaagccggggccttataccagatattgtcactcgcaactcgttcctggcctccctttgcaagcatgggagaagcaaggaagctgcagaatttcttgattccatgactgccaagggccacaaaccagatatcgtatcatactgtattttgcttcatgggtatggtactgaaggatgcttcgctgatatgattgatctctttaattcaatggaaagcaacggtattgcagccgactgccatgttttcaacatattaattaatggatatgcaaaacgtggaatgacagaagaagctatgctgatatttactgaaatgcggggacgagtaagtccagatgtagtcacctattccattgtaatagcagcactttccagaatgggcaagctgaccgatgctattgagaaattcaatgagatgactgccttggaagtacagccggacacaactgtttatcactcactgattcagggttgttgcatagacggtgatttggttaaagctaaggagctgatgtttgaaatgatgaacggtggtattcctcggcctaacattgtgttcttcaattcagtaataaacagtctgtgcaaagaaggaagggttatggatgcacatgatgtcttagacttggttataggcataggtgagaggcctaatgtcattacatttaattcactgattgatggatattgcttagtcgggaacatggataaagcattcaaaatacttgatgtcatggaatcagttggtgttgagcctaatgttgttacttatagtgcaatcttgatggctattctaaaaacagaaggattgatgatgctt

SEQ ID NO: 1828 - DNA, 2307 bp, Triticum aestivum
  source 1..2307: mol_type = genomic DNA
atgccagccgcccgcctgtcctccttcaaggctccttcacgagagcgccgacctcccctcgccgccttggctgccgccacggagcgcgtccgcgccggaacgctaagtcggcaggacgcgcaccacctgttcgacgaattgctgagccaagccgcgacagtcccagtacgcaagctgaacaactttcttgccgccctcgcccgtgcaccgccctcagctgcctgcagcgatggtccgggccttgccatcgccctcttcaaccgcatgtcccgaggcgctggtgcacgggtggtgtcgcccacgctctgtacctattccatcctcatggactgctgctgccgtgcacgccgcccggacttggtggttgccttcttcggccgcctcctcaggttggggctgcgcttggaggtcatctccttcaacaatctcctcaaggggctttgccaggccaagcgctcaaatgaggctttggacatgctgctccaccggacacctgaactacactgtgcgcctgatgtcttctcgtacaacatagtaatcaacggctgcttgaaagaaggtgaagtagacaaagcgtgcaatctcttccatgagatgccccaactgggagttcaacctgatgtggtgacctacacctcaatcatggacgcactaagcaagtccggagcaatggacaaggcagaagtgctccttcggcaaatggttgatcaaggaattgaacccaatatcaagacatatagctatctgatccatggatattctacttttggtcagtggaaggaggcacttagggtattcaaagaaatggcaagtcttggtgttgtaccagacgttgtcacgttgacctcattaatcgattccctttgcaagcacagaaggacaaaggaagctagagaaatttttgactctatggctgcaaagggcctgaaacctaatatcgtctcctactctactatgcctaatgggtatgtcaaagaaggatccttcgaggatatgactgatctcttcaattcgatggtacggaatggtatcgtacctaaccaccatattttcaacatactgatcaatgcatatgctaaacgtggagtgatggatgaggctatgcacatgttcgaagtaatgaggcaacaaggagtaaacccggatgtatttgactatcaaatcataatggattcactttgcaaaatgggtaggatggatgctgctctggacaaatttaatcagatggtcaatcaaggagtttcacctaacaaagctgtttaccaatgcctggttctgggttcttgctctcatggtcattttgtgaaagccaaggaattgatttctgaagtggttaatagaggtctgtgttctaacactgtgttcttctatcctgtaataaacggcctttgcaaagaaggaaaggtaaaggaggcacaggatatgtttgacttcatcctaggtattggtcagcggcctgatgtgattatgtacacttcactgatggatggatattgccttgttggcgaggtggagaaagcactgagtgtactcgatgctatgaaatctgctggccttcaacctgatgatgttgtatatgctacacttcttaacggttactgtaaaattggaaggatcgccgatggattgagccttttcagggaaatgtcactcagcggggttaagcccatgactattatatacaacattatactggatgggctgttttgctctgggagaacagtttgtgcaaaggaaaaattcaatacgatgactgaaagtggcataccagtgggcgttgacacatacaacatagttcttagtggactttgtagaaacaattgcactgatgaagcaatagagctgttcaagaaactacgtgcaacgaacgtgaagattgatgtcataacactcactaccatgatttctgcaatgtttaaaactaggagaattgaagaggccaaggatttgtttgctactatatcagccattgggttcatgccttctgttgtgacttacagtgtaatgatgacaaatttcataaaagaagggttgctggcagaggctgatgatatgtttttaacaatggagaaggctagctgtgcttccaactccagtctgctaaatcaagtggtcagggcgttgctggaaaaaggtgcagttgtaaaggctgcaacttatctcgctaaacttgatgctaaacagctgtcagttgaagcttcaacgatttcgttaatagtatctctcttctcaagggaagggaaactaagggagcatgtagagttgcttccagtaaagtaccagcctcctcagagttcggctgacaat

SEQ ID NO: 1829 - DNA, 2307 bp, Triticum aestivum; identical to SEQ ID NO: 1828
  source 1..2307: mol_type = genomic DNA

SEQ ID NO: 1830 - DNA, 1218 bp, Triticum aestivum
  source 1..1218: mol_type = genomic DNA
atggatgaggctatgcacatgttcgaagtaatgaggcaacaaggagtaaacccggatgtatttgactatcaaatcataatggattcactttgcaaaatgggtaggatggatgctgctctggacaaatttaatcagatggtcaatcaaggagtttcacctaacaaagctgtttaccaatgcctggttctgggttcttgctctcatggtcattttgtgaaagccaaggaattgatttctgaagtggttaatagaggtctgtgttctaacagtgtgttcttctatcctgtaataaacggcctttgcaaagaaggaaaggtaaaggaggcacaggatatgtttgacttcatcctaggtattggtcagcggcctgatgtgattatgtacacttcactgatggatggatattgccttgttggcgaggtggagaaagcactgagtgtactcgatgctatgaaatctgctggccttcaacctgatgatgttgtatatgctacacttcttaacggttactgtaaaattggaaggatcgccgatggattgagccttttcagggaaatgtcactcagcggggttaagcccatgactattatatacaacattatactggatgggctgttttgctccgggagaacagtttgtgcaaaggaaaaattcaatacgatgactgaaagtggcataccagtgggcgttgacacatacaacatagttcttagtggactttgtagaaacaattgcactgatgaagcaatagagctgttcaagaaactacgtgcaacgaacgtgaagattgatgtcataacactcactaccatgatttctgcaatgtttaaaactaggagaattgaagaggccaaggatttgtttgctactatatcagccattgggttggtgccttctgttgtgacttacagtgtaatgatgacgaatttcataaaagaagggttgctggcagaggctgatgatatgtttttaacaatggagaaggctagctgtgcttccaactccagtctgctaaatcaagtggtcagggcgttgctggaaaaaggtgcagttgtaaaggctgcaacttatctcgctaaacttgatgctaaacagctgtcagttgaagcttcaacgatttcgttaatagtatctctcttctcaagggaagggaaactaagggagcatgtagagttgcttccagtaaagtaccagcctcctcagagttcggctgacaat

SEQ ID NO: 1831 - DNA, 2307 bp, Triticum aestivum; identical to SEQ ID NO: 1828
  source 1..2307: mol_type = genomic DNA

SEQ ID NO: 1832 - DNA, 825 bp, Triticum aestivum
  source 1..825: mol_type = genomic DNA
atggatggatattgccttgttggcgaggtggagaaagcactgagtgtactcgatgctatgaaatctgctggccttcaacctgatgatgttgtatatgctacacttcttaacggttactgtaaaattggaaggatcgccgatggattgagccttttcagggaaatgtcactcagcggggttaagcccacgactattatatacaacattatacttgatgggctgttttgctctgggagaacagtttgtgcaaaggaaaaattcaatacgatgactgaaagtggcataccagtgggcgttgacacatacaacatagttcttagtggactttgtagaaacaattgcactgatgaagcaatagagctgttcaagaaactacgtgcaacgaacgtgaagattgatgtcataacattcaataccatgatttctgcaatgtttaaaactaggagaattgaagaggccaaggatttgtttgctactatatcagccattgggttggtgccttctgttgtgacttacagtgtaatgatgacgaatttcataaaagaagggttgctggcagaggctgatgatatgtttttaacaatggagaaggctagctgtgctcccaactccagtctgctaaatcaagtggtcagggcgttgctggaaaaaggtgcagttgtaaaggctgcaacttatctcgctaaacttgatgctaaacagctgtcagttgaagcttcaatgatttcgttaatagtatctctcttctcaagggaagggaaactaagggagcatgtagagttgcttccagtaaagtaccagcctcctcagagttcggctgacaat

SEQ ID NO: 1833 - DNA, 2355 bp, Triticum aestivum
  source 1..2355: mol_type = genomic DNA
atgtcgccactccgcctccgcctccgcctccggccccgcctccatgcccgccactcctactccacctcgcatccctcacgcagccagggctgggatccccacgccgccttcgctgctgccacggagcgagctcgatctggcaacctcacctcggaggacgcacacaagctgttcgaccaattgctcctgcaggctaatccggtcaacatgcgccttcccaacgaccttctcaccgccctggctcgcgcgcctgcgtccgcagcctgcagcaacggccccgcccttgccctcgccctcttcagccgtttgtcccaaggtgcccgccaacgggtggtgcagccaacggcctgcacctacggcatcctcatggactgctgctgccgcgcaaaccgccaggatctggcgctcgccttcttcgcccgtctcctcaggacgggactcaaggcaggcgtcatagaagtcaacactcttctcaagggactctgccgcgcaaagcgggctgatgaggctctggacattctgcttcacaggatgcctgagctaggctgcacccccaacgtggtggcatataacacggtcatccatggcttcttccaagaaggccaagcaggcaaggcgtgcagcttgttccatgaaatggcgcagcagggcgttgcgcctagtttggtgacatataactcggttattgatgcgctgtgcaaggccagagccatggacaaggcagagtatttccttcgtcagatggttgatgatggtgtcgtacctgataatgtgacatataatagcctcatccatggatattcctcttcaggccactggaaggaggcagttagggtattcaaagagatgacaagtcggagggttaaaccaattgtgcatactcacaacatgtttatgacctttctttgcaaacatggaagaagcaaagaagctgcaggaatttttgataccatggctatgaagggcctgaaacataacaacgtttcatatgctattctccttcacgggtatgccaccgaaggatgcttagttgatatgattaatctcttcaattcaatggaaagatactgcattctacctgactgtcgtatcttcaacatactgattaatgcacatgctaaatctgggaagcttgataaggccatgcttatcttcaatgaaatgcagaaacaaggagtgagtccaaatgcagtcacatattcaaccataatacatgcattttgcaaaaagggtaggttggacgatgctgtgataaagtttaatcagatgattgatacaggagtacgacagggcacagctgtttatcgttccctaatccagggtttttgtacacacggcgatttggtgaaagcaaaggaattgcttactgaaatgatgaacaaaggtatgcttcctcctgatattgcattcttcaattcaatcatgcagaacctttgcacagaaggaagggtaatagaagcacgggatgtccttggcttgatagcgcacataggtatgaggcctgatgtttgcacatttaatatactgatcggtggatactgcctagtcggcaagatggaacatgcctcaaaaatatttgatgatatgatgtcatatggcttagaaccttctaatattacgtatggtatacttattaatggctattgcaaaaatagaaggattgatgacgggcttattctgttcaaagagatgctgcacaagggacttaaacctacaacttttaattataacgtcatactggatggattatttctggctggacgaactgttgctgcaaaggaaaagtttgatgagatggttgaatctggagtaagtgtgtgcattggtacatattcgatagttcttggtggactttgtagaaataattgtagcggcgaagcaatcacgctattccagaaattaagcacaatggatgtgaaattcaatattataattgtcaatataatgattgatgctttctacaaggttcagcgaaaccaagaagccaaggatttgtttgctgcagtatcagccaatggtttggtagctaatgtctttacctacaccataatgatgaaaaatcttataaaagaagggtcagtggaagaagctgacgatctctttttatcaatggagaagagcagctgtactgctgactcttatatgttaaatcttatcgtcagaatgttactgggaaaaggagagatagtcaaggctgggaattatatatctaaaattgatgcaaagagctactcacttgaagctaaaactgtttcgctgcttatctctctcttttcagggaaagggaaatatagagaacacataggattgctccctgcaaagtatcggtttcgtgaagaagcagctacagttgtg

SEQ ID NO: 1834 - DNA, 1515 bp, Triticum aestivum
  source 1..1515: mol_type = genomic DNA
atgtcgccgctccgcctccatgcccgccgctcctactccacctcgcatcccccacgcagccagggctgggatccccacgccgccttcgcagctgccacggagcgcgcgcgatctggcaacctcacctcggaggacgcacacaagctgttcgaccaattgctcctgcaggctaatccggtcaacatgcgccttcccaacgaccttctcaccgccctggctcgcgcgcctgcgtccgcagcctgcagcaacggccccgcccttgccctcgccctcttcagccgtttgtcccaaggtgcccgccaacgggtggtgcagccaacggcctgcacctacggcatcctcatggactgctgctgccgcgcaaaccgccaagatctggcgctcgccttcttcgcccgtctcctcaggacgggactcaaggcaggcgtcatagaagtcaacactcttctcaagggactctgccgcgcaaagtgggctgatgaggctctggacattctgcttcacaggatgcctgagctaggctgcacccccaacgtggtggcatataacacggtcatccatggcttcttccaagaaggccaagcaggcaaggcgtgcagcttgttccatgaaatggcgcagcagggcgttgcgcctagtttggtgacatataactcggttattgatgcgctgtgcaaggccagagccatggacaaggcagagtatttccttcgtcagatggttgatgatggtgtcatacctgataatgtgacatataatagcctcatccatggatattcctcttcaggccactggaaggaggcagttagggtattcaaagagatgacaagtcggagggttaaaccaaatgtgcatactcacaacatgtttatgacctttctttgcaaacatggaagaagcaaagaagctgcaggaatttttgataccatggctatgaagggcctgaaacataacaacgtttcatatgctattctccttcacgggtatgccaccgaaggatgcttagttgatatgattaatctcttcaattcaatggaaagatactgcattctacctgactgtcgtatcttcaacatactgattcatgcacatgctaaatctgggaagcttgataaggccatgcttatcttcaatgaaatgcagaaacaaggagtgagtccaaatgcagtcacatattcaaccataatacatgcattttgcaaaaagggtaggttggacgatgctgtgataaagtttaatcagatgattgatacaggagtacgacagggcacagctgtttatcgttccctaatccagggtttttgtacacacggcgatttggtgaaagcaaaggaattgcttactgaaatgatgaacaaaggtatgcttcctcctgatattgcattcttcaattcaatcatgcagaacctttgcacagaaggaagggtaatagaagcacgggatgtccttggcttgatagcgcacataggtatgaggcctgatgtttgcacatttaatatactggtggatactgcc

SEQ ID NO: 1835 - DNA, 2355 bp, Triticum aestivum; identical to SEQ ID NO: 1833
  source 1..2355: mol_type = genomic DNA

SEQ ID NO: 1836 - DNA, 2007 bp, Triticum aestivum
  source 1..2007: mol_type = genomic DNA
atgaggtcgtcgccagcaccctcctcaagtgcctcttctgtgcaaaacgggcagatgaagctgttgaacgtgctgcttcataggacgtccgtcctcggctgtgtgcctaattccttctcatacaacatagttctaaagagtttatgtgacgacagcaggagccagcaagcactcggcctgctccaggtgatggcaaagggagatgattgctcccccggcgttctgtcatatagcacgctcatccacggcttctttaaggaaggcgaagtaggcaaggcatgcaatctattccatgaaatgatgcggcaaggggttgtgcctgatgtggtgacgtatagctcgattattgatgcactgtgcaaggctggagcaatggacaaggcagagttgttccttcggcagatggttgataacagtgttcgaccggatacggtgacatatactagcatgatccatggatattccactttgggccggtggaaagaggcgactaaaatgttcagagaaatgacaagcaggggccttataccaaatattgtcacttggaactcattcatggcctccctttgcaagcatggaaaaagcaaagaagctgcagaaattttcttttccatggctgcaaggggccacaagcctgatatcatctcctacactattcttcttcatgggtatgccaatgaaggaagctttgctgatatgatgaatctctttaattcaatggtaggcgacggtattgtagccaactgccaagttttcaacatattaattgatgcatatgctaaacaaagaatgatggatgaagctatgatcatacttaataaaatgcggggacaaggactgagtccggatgtattcacctattcaactctagtatctgcactttgcaaaatggttagactggctgatgctatgggtaagttcagtcagatgattggtaggggagtacaaccgaacacagttgtttaccactccgtagttcagggcttatgcacacatggtgttttggtaaaagcaaaggagttggttaatgaaatgatgaataaaggtatgcttcgtccaaacattgcattcttcaattcaataatggacaacctatgcaatgaaggaagggttgtggatgcacaccatatctttgacttgattacagacataggtgagaaacctgatgtcattacatttagtacgctaattgacggatattgcttagtcggtgagatggagaaagcatgcggagtacttgatgccatggtatcagctggcattgagcccgatgtcattacgtataacacacttgtcagtggatactgtaaaagtggaaggattgatgatgggttgaatctgttcagagaaatgttccatatggaagttaaacctacaactgttacatataacatcatactggatggattatttcatgctgggagaacagttgctgcaaagaaaatgctccatgagatgatcggaagtggaacacctgtgagcatgcatacatacgacatatttattagaggactttgtagaaatgattgcaccgatgaagcaatcgcccttttccaaaaattaggtgcactgaatgtgaagttcgatattgcaatactcaattccatgattaatgcaatgtacaaggttcagagaagagaagaagctaacaagttgtttgctgctatatcaaccagtgggttggtacctaatgcttccacgtatggaatcatgataagaaatcttctaaaagagggatcagtggaagaagctgaagatatgttttcatcaatggagaagagtgattgtgctctcagctctcgtcttataaatgatatcattagaatgttattggaaaagggggagatagtcaaggccggagaatacatgtctaaagttgatgggaagagcatctcgcttgaagcttcaactagttcgttgttgttgtctctcttttcagggaaagggaaatatcgggaacaaatacaattgctccctgcaaagtaccaatttttcgatggaaccatt

SEQ ID NO: 1837 - DNA, 2007 bp, Triticum aestivum; identical to SEQ ID NO: 1836
  source 1..2007: mol_type = genomic DNA

SEQ ID NO: 1838 - DNA, 2436 bp, Triticum aestivum
  source 1..2436: mol_type = genomic DNA
atgtcctgcctccacctcctccgccgtcgcacctcctccttcactcccacctcgccgccctcacgctcctggtctccgcacgccgcctttgccgctgccacagagcgcgtccgcgccgggacgctcaccccacaagacgcacaccacctgttcgaccaattgctgcggcagtccactccggtccccgggcaagccctgaacggcttcctcgccggtcttgcccgtgcgcgagacaccgacgcctgcagagacggcccctcccttgccctcacgctcttcaaccgcgtatgccgagaagaagccggccggcgggtggcgccgcccacaatctacacctacggcatcctgatgaactgctgctgccacgtgcgtcgtccagacctagggcttgcctatttcggccgcctcctaaggaccggcctcaatacaaatgaggtcgtcgccagcaccctcctcaagtgcctctgctgtgcaaaacgggcagatgaagctgtgaacgtgctgcttcataggacgtccgtcctcggctgtgtgcctaattccttctcatacaacatagttctaaagagtttatgtgacgacagcaggagccagcaagcactcggcctgctccaggtgatggcaaagggagatgattgctcccccggcgttctgtcatatagaacgctcatccacggcttctttaaggaaggcgaagtaggcaaggcatgcaatctattccatgaaatgatgcggcaaggggttgtgcctgatgtggtgacgtatagctcgattattgatgcactgtgcaaggctggagcaatggacaaggcagagttgttccttcggcagatggttgataacagtgttcgaccggatacggtgacatatactagcatgatccatggatattccactttgggccggtggaaagaggcgactaaaatgttcagagaaatgacaagcaggggccttataccaaatattgtcacttggaactcattcatggcctccctttgcaagcatggaaaaagcaaagaagctgcagaaattttcttttccatggctgcaaggggccacaagcctgatatcatctcctacactattcttcttcatgggtatgccaatgaaggaagctttgctgatatgatgaatctctttaattcaatggtaggcgacggtattgtagccaactgccaagttttcaacatattaattgatgcatatgctaaacaaggaatgatggatgaagctatgatcatacttaataaaatgcggggacaaggactgagtccggatgtattcacctattcaactctagtatctgcactttgcaaaatgggtagactggctgatgctatgggtaagttcagtcagatgattggtaggggagtacaaccgaacacagttgtttaccactccctagttcagggcttatgtacacatggtgttttggtaaaagcaaaggagttggttaatgaaatgatgaataaaggtatgcttcgtccaaacattgcattcttcaattcaataatggacaacctatgcaatgaaggaagggttgtggatgcacaccatatctttgacttggttacagacataggtgagaaacctgatgtcattacatttactacgctaattgacggatattgcttagtcggtgagatggagaaagcatgcggagtacttgatgccatggtatcagctggcattgagcccgatgtcattacgtataacacacttgtcagtggatactgtaaaagtggaaggattgatgatgggttgaatctgttcagagaaatgtcccatatggaagttaaacctacaactgttacatataacatcatactggatggattatttcatgctgggagaacagttgctgcaaagaaaatgctccatgagatgatcggaagtggaacacctgtgagcatgcatacatacgacatatttattagaggactttgtagaaatgattgcaccaatgaagcaatcgcccttttccaaaaattaggtgcactgaatgtgaagttcgatattgcaatactcaattccatgattaatgcaatgtacaaggttcagagaagagaagaagctaacaagttgtttgctgctatatcaaccactgggttggtacctaatgcttccacgtatggaatcatgataagaaatcttctaaaagagggatcagtggaagaagctgaagatatgttttcatcaatggagaagagtgattgtgctctcagctctcgtcttataaatgatatcattagaatgttattggaaaagggggagatagtcaaggccggagaatacatgtctaaagttgatgggaagagcatctcgcttgaagcttcaactagttcgttgttgttgtctctcttttcagggaaagggaaatatcgggaacaaatacaattgctccctgcaaagtaccaatttttcgatggaaccatt

SEQ ID NO: 1839 - DNA, 2007 bp, Triticum aestivum; identical to SEQ ID NO: 1836
  source 1..2007: mol_type = genomic DNA

SEQ ID NO: 1840 - DNA, 2436 bp, Triticum aestivum; identical to SEQ ID NO: 1838
  source 1..2436: mol_type = genomic DNA

SEQ ID NO: 1841 - DNA, 2436 bp, Triticum aestivum; identical to SEQ ID NO: 1838
  source 1..2436: mol_type = genomic DNA

SEQ ID NO: 1842 - DNA, 2364 bp, Triticum aestivum
  source 1..2364: mol_type = genomic DNA
atgcctcgcttctccaccaccacgccaatgtcgccaccacgcctccgcctccgactcggcgcccgccactcctcctccacctctcatccctcatgcatctgggatccccacgccgccttcgccgccgcgacgcagcgggcgcgctctggcaagctcaccacggaggacgcacaccacctgttcgacgaattgctgcggcagggcaatcctgtccaggagcgtcccttgactaactttctggctgccctcgcccgtgcgcccgcgtccgcatcctgcagcgacggccccgccctggccgtcgccctttttggccgtttgtcccgaggcgctggacgaggggtggcacagccaaatgtcttcacctatggcgtcctaatggactgctgctgccgtgcgcgcttcccagatttggcgctcgccttctttggccgtctcctcaggacgggcctgaaggcagaccaagtcgttttcagcaccctcctcaagggactctgccacgcaaagcgctcagatgaggctctggacgtgctgctgcacaggatgcctgagctgggctgcacccccgacgtggtggtgtataataccgtcatccatggcttctttagggaaggccaagcaggcaaggcgtgcgatctgttccatggaatggcgcagcagggcgttatgcctgatgtggtgacatataactcggttatcgatgcactgtgcaaggccagagcaatggacaaggcagagtatttccttcgtcagatggttgatgatggtgttgtacctgataatgtgacatatagtagcctcatccatggatattcctcttcaggccactggaaggaggctgttagggtattcaaagagatgacaagtcggagggttacaccagatgtgcatacttacaacatgtttatgacctttctttgcaaacatggaagaagcaaagaagctgcaggtatttttgataccatggctatgaagggcctgaaacctgacaacatttcatatgctattcgccttcatgggtatgccaccgaaggatgcttagttgatatgattaatctcttcaattcaatggaaagagactgcattctacctgactgtcgtatcttcagcatactgattaatgcatatgctaaatctggaaagcttgataaggctatgcttatcttcaataaaatgcagaaacaaggagtgagtccaaatgcagtcacatattcaactgtaatagatgcattttgcaaaaagggtcagttggacgatgctatgataaagtttaatcagatgattgatacaggagtacgacagggcacagctgtttatggttctctaatccagggtttttgtacacacggcgatttggtgaaagcaaaggaattgcttactgaaatgatgaacaaaggtatacctcctcctgatattaagttcttccattcaatcatgcagaacctttgcacagaaggaagggtaatagaagcacgggatgtctttggcttgatggcgcacataggtatcaggcctaatgtttgcacatttaatatactgatcggtggatactgcctagtcggcaagatggaggatgcctcaaaaatatttgatgatatgatgtcatatggtttagaaccttctaatattacgtatggtatacttattaatggctattgcaaaaacgaaaggattgatgatgggctgattctgttcaaagaaatgttgcgcaagggagttaaaccttcaacttttaattataacatcatactggatggattatttctggctggacgaactgttgctgcaaaggaaaagtttgatgagatggttgaatctggagtaagtgtgtgcattgatacatattcgatagttcttggtggactttgtagaaataattgtagcggcgaagcaatcatgctattccagaaattaagcacaatggatgtgaaattcaatattataattgtcaatataatgattgatgccttctacagggttcagcgaaaccaagaagccaaggatttgtttgctgcagtatcagcgaatggtttggtagctaatgtctttacctacaccataatgatgaaaaatcttataaaagaagggtcagtggaagaagctgacgatctctttttatcaatggagaagagcggctgtactgctgactcttatatgttaaatcttatcgtcagaatgttacttgaaaaaggagagctagtcaaggctgggaattatatgtctaaagttgatgcaaagagctactcacttgaagctgaaaccgtttcgctgcttatctctctcttttcagggaaagggaaatatagagaacacataggattgctccctacaaagtatcagtttcgtgaagaagcggccacagttgaa

SEQ ID NO: 1843 - DNA, 1863 bp, Triticum aestivum
  source 1..1863: mol_type = genomic DNA
atgattaaaagggatgtagataagataactgaaggttgccgcctagcacattcacattggtacaacttggaaaagcacagccccgtcgtcctgctcccagttgagttcgcgacctacacaccggccatgccccgcttctcctccaccacgccaatgtcgccaccccgcctccgcctccgactccgactctgcgcccgccactcctcctccacctctcatccctcacgcatctgggatccccacgccgccttcgccgccgccacggagcgtgcgcgttcaggcaacctcaccccggaggacgcacaccacctgttcgacgaattgctgcggcagggcaatcctgtccaggagcgtcccttgactaactttctggctgccctcgcccgtgcgcccgcgtccgcatcctgcagcgacggccccgccctggccgtcgccctttttggccgtttgtcccgaggcgctggacgaggggtggcacagccaaatgtcttcacctatggcgtcctaatggactgctgctgccgtgcgcgcttcccagatttggcgctcgccttctttggccgtctcctcaggacgggcctgaaggcagaccaagtcgttttcagcaccctcctcaagggactctgccacgcaaagcgctcagatgaggctctggacgtgctgctgcacaggatgcctgagctgggctgcactccctatgtggtggcgtataacaccgtcatccatggcttctttagggaaggccaagcaggcaaggcgtgcgatctgttccatggaatggcgcagcagggcgttatgcctgatgtggtgacatataactcggttatcgatgcgctgtgcaaggccagagcaatggacaaggcagagtatttccttcgtcagatggttgatgatggtgttgtacctgataatgtgacatatagtagcctcatccatggatattcctcttcaggccactggaaggaggctgttagggtattcaaagagatgacaagtcggagggttacaccagatgtgcatacttacaacatgtttatgacctttctttgcaaacatggaagaagcaaagaagctgcaggtatttttgataccatggctatgaagggcctgaaacctgacaacatttcatatgctattcgccttcatgggtatgccaccgaaggatgcttagttgatatgattaatctcttcaattcaatggaaagggactgcattctacctgactgtcgtatcttcagcatactgattaatgcatatgctaaatctgggaagcttgataaggctatgcttatcttcaataaaatgcagaaacaaggagtgagtccaaatgcagtcacatattcaactgtaatagatgcattttgcaaaaagggtcagttggacgatgctatgataaagtttaatcagatgattgatacaggagtacgacagggcacagctgtttatggttctctaatccagggtttttgtacacacggcgatttggtgaaagcaaaggaattgcttactgaaatgatgaacaaaggtatacctcctcctgatattaagttcttccattcaatcatgcagaacctttgcacagaaggaagggtaatagaagcacgggatgtccttggcttgatggcgcacataggtatcaggcctaatgtttgcacatttaatatactgatcggtggatactgcctagtcggcaagatggaggatgcctcaaaaatatttgatgatatgatgtcatatggtttagaaccttctaatattacgtatggtatacttattaatggctattgcaaaaacgaaaggattgatgatgggctgattctgttcaaagaaatgttgcgcaagggagttaaaccttccaagttt

SEQ ID NO: 1844 - DNA, 2376 bp, Triticum aestivum
  source 1..2376: mol_type = genomic DNA
atgccccgcttctcctcctccacgccaatgtcgccaccccgcctccgcctccgactccgactccgactctgcgcccgccactcctcctccacctctcatccctcacgcatctgggatccccacgccgccttcgccgccgcgacgcagcgggcgcgctctggcaagctcaccacggaggacgcacaccacctgttcgacgaattgctgcggcagggcaatcctgtccaggagcgtcccttgactaactttctggctgccctcgcccgtgcgcccgcgtccgcatcctgcagcgacggccccgccctggccgtcgccctttttggccgtttgtcccgaggcgctggacgaggggtggcacagccaaatgtcttcacctatggcgtcctaatggactgctgctgccgtgcgcgcttcccagatttggcgctcgccttcttgggccgtctcctcaggacgggcctgaaggcagaccaagtcgttttcagcaccctcctcaagggactctgccacgcaaagcgctcagatgaggctctggacgtgctgcttcacaggatgcctgagcagggctgcactccctatgtggtggcgtataacaccgtcatccatggcttctttagggaaggccaagcaggcaaggcgtgcgatctgttccatggaatggcgcagcagggcgttatgcctgatgtggtgacatataactcggttatcgatgcgctgtgcaaggccagagcaatggacaaggcagagtatttccttcgtcagatggttgatgatggtgttgtacctgataatgtgacatatagtagcctcatccatggatattcctcttcaggccactggaaggaggctgttagggtattcaaagagatgacaagtcggagggttacaccagatgtgcatacttacaacatgtttatgacctttctttgcaaacatggaagaagcaaagaagctgcaggtatttttgataccatggctatgaagggcctgaaacctgacaacatttcatatgctattcgccttcatgggtatgccaccgaaggatgcttagttgatatgattaatctcttcaattcaatggaaagggactgcattctacctgactgtcgtatcttcagcatactgattaatgcatatgctaaatctgggaagcttgataaggctatgcttatcttcaataaaatgcagaaacaaggagtgagtccaaatgcagtcacatattcaactgtaatagatgcattttgcaaaaagggtcagttggacgatgctatgataaagtttaatcagatgattgatacaggagtacgacagggcacagctgtttatggttctctaatccagggtttttgtacacacggcgatttggtgaaagcaaaggaattgcttactgaaatgatgaacaaaggtatacctcctcctgatattaagttcttccattcaatcatgcagaacctttgcacagaaggaagggtaatagaagcacgggatgtccttggcttgatggcgcacataggtatcaggcctaatgtttgcacatttaatatactgatcggtggatactgcctagtcggcaagatggaggatgcctcaaaaatatttgatgatatgatgtcatatggtttagaaccttctaatattacgtatggtatacttattaatggctattgcaaaaacgaaaggattgatgatgggctgattctgttcaaagaaatgttgcgcaagggagttaaaccttcaacttttaattataacatcatactggatggattatttctggctggacgaactgttgctgcaaaggaaaagtttgatgagatggttgaatctggagtaagtgtgtgcattgatacatattcgatagttcttggtggactttgtagaaataattgtagcggcgaagcaatcatgctattccagaaattaagcacaatggatgtgaaattcaatattataattgtcaatataatgattgatgccttctacagggttcagcgaaaccaagaagccaaggatttgtttgctgcagtatcagcgaatggtttggtagctaatgtctttacctacaccataatgatgaaaaatcttataaaagaagggtcagtggaagaagctgacgatctctttttatcaatggagaagagcggctgtactgctgactcttatatgttaaatcttatcgtcagaatgttacttgaaaaaggagagctagtcaaggctgggaattatatgtctaaagttgatgcaaagagctactcacttgaagctgaaaccgtttcgctgcttatctctctcttttcagggaaagggaaatatagagaacacataggattgctccctacaaagtatcagtttcgtgaagaagcggccacagttgaa

SEQ ID NO: 1845 - DNA, 2352 bp, Triticum aestivum
  source 1..2352: mol_type = genomic DNA
atgcctcgcctctcctccaccacgcccatgtcgccactccgcctccgcgcccgccactcctcctccacctctcatccctcacgcatctgggatccccacaccgccttcgccaccgccacggagcgtgcgcgttcaggcaacctcaccccggaggacgcacaccacctgttcgacgaattgctgcggcaggccaatcctgtccaggagcgccccctcaacaaccttcttgccgccctcgcccgcgctccggcgtccgcggcgtgcagcgatggccctgcactcgcagtcaacctcttcagccgcatatccgaaggcgcccgccgacgtgtggcgcacccaacggcctgcacctacggcatcctcatggactgctgctgccgcgcaaaccgccaggatctggcgctcgccttcttcgcccgtctcctcaggacgggactcaaggcaggcgtcatagaagtcaacactcttctcaagggactctgccgcgcaaagcgggctgatgaggctctggacattctgcttcacaggatgcctgagctaggctgcacccccaacgtggtggcatataacacggtcatccatggcttctttagggaaggccaagtaggcaaggcgtgcaatctattccatgaaatgaggcagcagggcgttacacctgatgttgtgacatataactcggttattgatgcgttgtgcaaggccaaagcaatggacaaggcagagtatttccttggtcagatggttgatgatggtgtcgtatctgataatgtgacatataatagcctcatccatggatattcctcttcaggccactggaaggaggctgttagggtattcaaagagatgacaagtcggagggttacaccagatttgcatacttacaacatgtttatgacctttctttgcaaccatggaagaagcaaagaagctgcaggaatttttgattccatggctatgaagggcctgaaacctgacaacgtttcatatgctattcgccttcatgggtatgccaccgaaggatgcttagttgatatgattaatctcttcaattcaatggaaagagactgcattcttcctgactgtcgtatcttcagcatactgatttatgcatatgctaaatctgggaagcttgataaggctatgcttatcttcaatgaaatgcagaaacaaggagtgagtccaaatgcagtcacatattcaaccgtaatagatgcattttgcaaaaagggtcagttggacgatgctatgataaagtttaatcagatgattgatacaggagtacgacagggcacagctgtttatcgttccctaatccagggattttgtacacacggcgatttggtgaaagcaaaggaattgcttactgaaatgatgaacaaaggtatacctcctcctgatattaagttcttccattcaatcatgcagaacctatgcacagaaggaagggtaatagaagcacgggatatccttggcttgatagcacacataggtatgaggcctaatgtttgcacatttaatatactgattggtggatactgcctagtccgcaagatggcagatgcatcgaaagtatttgatgatatggtgtcatatggtttagaaccttgtaactttacgtatggtatacttattaatggctattgcaaaaatagaaggattgatgacgggcttattctgttcaaagagatgctgcacaagggacttaaacctacaactgttaattataacgtcatactggatggattatttctggctggacaaactgttgctgcaaaagagaagtttgatgagatggttgaatctggagtaagtgtgtgcattgatacatactctatagttcttggtggactttgtagaaatagctgcagtagcgaagcgatcaccctgttccgaaaattaagtgcaatgaatgtgaaatttgatattaaaattgtcaatatcattattggtgcattctacagggtcaagagaaaccaagaggctaaggatttgtttgctgctataccagccaatggcttggttcctaatgctgttacctacaccataatgatgacaaatcttataaaagaaggttcagtggaagaagccgacaatctttttttatcaatggagaagagcggctctactgcaaactcttggatgttaaatcatattatcagaaggttactggaaagaggagagatagtcaaggctggaaattatatgtctaaagttgatgtaaagagctactcacttgaagctaaaactgtttcactgctgatctctctgttttcaagggaaggggaatatagagaccacatcaaattgctccctataaagtatcagtttctggaaaaaccagccacagttgaa

SEQ ID NO: 1846 - DNA, 2352 bp, Triticum aestivum; identical to SEQ ID NO: 1845
  source 1..2352: mol_type = genomic DNA

SEQ ID NO: 1847 - DNA, 2364 bp, Triticum aestivum
  source 1..2364: mol_type = genomic DNA
atgcctcgtttctcctccaccacgtcaatgtcgtcactccgcctccgcctccacgcccgccactcctcctccgcctctcaaccctcacacagccagggctgggatccccacgccgccttcgccgccgccacggagcgtgcgcgctctggcagcctcaccccggtggacgcacaccacctgttcgacgaattgctccggcagaccaatcctgtccaggagcaacccctcaacaaccttctcgccgccctcgcccgcgctccggcgtccaacgcctgcagagacggccctgcactcgcggtcgccctcttcagccgcatatcccaaggcgcccgcctacgggtggcgcagccaacggcctgcacctacggcatcctcatggactgctgctgtcgtgcacatcgcctggatctggcgtttgccttcttcggccgtctcctcaggacgggactgaaggcaggcgtcattcaactctgcactcttctcaagggcctttgccgcgcaaagcgggctgatgaggccatggacgtgctgcttcataggatgcctgagctgggctgcacccccaacgtggtggcctataccacggtcatccacggcttcttgaaggaaggccaagtaggcaaggcatgcaatctattccatggaatggcgcagcagggcgttgcacctaatgtggtgacatataactcggttatcgatgcgctatgcaaggccagggccatgggaaaggcagagatggtccttggtcaaatggttgttaatggtgttggaccgagtaacgtgacatataatactctcatccatggatattcctcttcaggtcatcagaaggaggcagttagggtgctgaaagaaatgagaagtcagggtatcataccagatgtttttacttgcagctcgctcatggcctccctttgcaacaacggaaaaagcaaagaagctgaagaaattcttcactccatggtcatgaagggcctgaaacctgacatcgtctcgtacagtactctgcttcacgggtatgccaccgaaggatgcttagttggtatgactaatctcttcaattcaatgactagatatggcattcgccctaacagtcatgcttttaacatactgattaatgtatgtgctaaatctggcatgatggatgaggctatgcttatatttaaagaaatgcagaagcgaggagtgagtccaaatctagtcacctattcaactgtaatacatgcattttgcaaaatgggtagcttggacattgctatggacaaatttaaccagatggttgatataggagtacgaccggatgcaattgtttatcgttccctaatccatggtttttgtacacatggggatttagtgaaaccaaaggaattggttactgaaatgaggaacaaaggtatgcgtcctcctgatattaagttcttccattcaataatgcagaacctatgcacggaaggaagggtaatagaagcacgggatatcctcgacttgatagtgcgcattggtatgaggcctgatgttttcatatttaatatactgatcggtggatactgcctagtccgcaagatggcagatgcatcaaaaatatttgatgatatggtgtcatatggtttagaaccttcaaatattacgtatggtatacttattaatggctattgcaaaaacagaaggattgatgaggggctgattctattcaaagaaatgttgtgcaagggacttaaacctacaacttttaactataacgtcatactggatggactatttctggctggacgaactgttgctgcgaaggagaagtttgatgagatggttgaatctggagtaagtgtgtgcatcgatacttactctatatttcttgctggactttgcagaaataattgctttagtgaagtaatcatgctgttccagaaattaagcgcaatgaacatgaaattcaatattagaattgtcaatatcatgattgatgccttctacaaggttcggcgaaaccatgaagctaaggatttgtttgccgcaataccatccaatggcttggtagctaatgttgttacctacagcataatgatgacaaatctgataaaagaaggttcagtggaagaagctgacactctctttttatcaatggagaagagcggctgtactgcaaactcttggatgttaaatcatattatcagaaggttactggaaagaggagagatagtcaaggctggaaattatatgtcgaaagttgatgcaaagagctactcacttgaagctaaaactgttttgctgctgatctctctcttttcagggaaagggaaatatagagaacacataaaattgctccctatgaagtatcagtttctcgaagaaccagacacagttgaa

SEQ ID NO: 1848 - DNA, 2364 bp, Triticum aestivum
  source 1..2364: mol_type = genomic DNA
atgcctcgtttctcctccaccacgtcaatgtcgtcactccgcctccgcctccacgcccgccactcctcctccgcctctcaaccctcacacagccagggctgggatccccacgccgccttcgccgccgccacggagcgtgcgcgctctggcagcctcaccccggtggacgcacaccacctgttcgacgaattgctccggcagaccaatcctgtccaggagcaacccctcaacaaccttctcgccgccctcgcccgcgctccggcgtccaacgcctgcagagacggccctgcactcgcggtcgccctcttcagccgcatatcccaaggcgcccgcctacgggtggcgcagccaacggcctgcacctacggcatcctcatggactgctgctgtcgtgcacatcgcctggatctggcgtttgccttcttcggccgtctcctcaggacgggactgaaggcaggcgtcattcaactctgcactcttctcaagggcctttgccgcgcaaagcgggctgatgaggccatggacgtgctgcttcataggatgcctgagctgggctgcacccccaacgtggtggcctataccacggtcatccacggcttcttgaaggaaggccaagtaggcaaggcatgcaatctattccatggaatggcgcagcagggcgttgcacctaatgtggtgacatataactcggttatcgatgcgctatgcaaggccagggccatgggaaaggcagagatggtccttggtcaaatggttgttaatggtgttggaccgagtaacgtgacatataatactctcatccatggatattcctcttcaggtcatcagaaggaggcagttagggtgctgaaagaaatgagaagtcagggtatcataccagatgtttttacttgcagctcgctcatggcctccctttgcaacaacggaaaaagcaaagaagctgaagaaattcttcactccatggtcatgaagggcctgaaacctgacatcgtctcgtacagtactctgcttcacgggtatgccaccgaaggatgcttagttggtatgactaatctcttcaattcaatgactagatatggcattcgccctaacagtcatgcttttaacatactgattaatgtatgtgctaaatctggcatgatggatgaggctatgcttatatttaaagaaatgcagaagcgaggagtgagtccaaatctagtcacctattcaactgtaatacatgcattttgcaaaatgggtagcttggacattgctatggacaaatttaaccagatggttgatataggagtacgaccggatgcaattgtttatcgttccctaatccatggtttttgtacacatggggatttagtgaaaccaaaggaattggttactgaaatgaggaacaaaggtatgcgtcctcctgatattaagttcttccattcaataatgcagaacctatgcacggaaggaagggtaatagaagcacgggatatcctcgacttgatagtgcgcattggtatgaggcctgatgttttcatatttaatatactgatcggtggatactgcctagtccgcaagatggcagatgcatcaaaaatatttgatgatttggtgtcatatggtttagaaccttcaaatattacgtatggtatacttattaatggctattgcaaaaacagaaggattgatgaggggctgattctattcaaagaaatgttgtgcaagggacttaaacctacaacttttaactataacgtcatactggatggactatttctggctggacgaactgttgctgcgaaggagaagtttgatgagatggttgaatctggagtaagtgtgtgcattgatacttactctatatttcttgctggactttgcagaaataattgctttagtgaagtaatcatgctgttccagaaattaagcgcaatgaacatgaaattcaatattagaattgtcaatatcatgattgatgccttctacaaggttcggcgaaaccatgaagctaaggatttgtttgccgcaataccatccaatggcttggtagctaatgttgttacctacagcataatgatgacaaatctgataaaagaaggttcagtggaagaagctgacactctctttttatcaatggagaagagcggctgtactgcaaactcttggatgttaaatcatattatcagaaggttactggaaagaggagagatagtcaaggctggaaattatatgtcgaaagttgatgcaaagagctactcacttgaagctaaaactgttttgctgctgatctctctcttttcagggaaagggaaatatagagaacacataaaattactccctatgaagtatcagtttctcgaagaaccagacacagttgaa

SEQ ID NO: 1849 - DNA, 2370 bp, Triticum aestivum
  source 1..2370: mol_type = genomic DNA
atgcctcgcttctcttccaccacgccaatggcgtcactccgcctccgcctccgcctccacgcccgcaactactcatccgcctctcaaccctcacacggccagggctgggatccccacgccgccttcgccgccgccacggagcgtgcccgctctggcagcctcaccccggcggacgcacaccacctgttcgacgaattgctgcggcaggccaatcctgtccaggagcgccccctcaacaaccttctcgccgccatcgcccgcgctccggcgtccaacgcctgcagaaacggccctgcactcgcggtcgccctcttcagccgcatatcccaaggcgcccgcctatgggtggtgcagccaacggcttgcacctacggcatcctcatggactgctgctgccgtgcacatcgcctggatctggcgtttgccttcttcggccgtctcctcaggacgggactgaaggcaggcgtcattcaactctgcactcttctcaagggcctttgccgcgcagagcgggctgatgaggccatggacgtgctgcttcataggatgcctgagctgggctgcacccccaacgtggtggcctataccacggtcatccacggcttcttgaaggaaggccaagtaggcaaggcatgcaatctattccatggaatggcgcagcagggcgttgcacctaatgtggtgacatataactcgtttatcgatgcgctatgcaaggccagggccatgggaaaggcagagatggtccttggtcaaatggttgttaatggtgttggacctagtaacgtgacatataatactctcatccatggatattcctcttcaggtcatcagaaggaggcagttagggtgctgaaagaaatgagaagtcagggtatcataccagatgtttttacttgcagctcgctcatggcctccctttgcaacaacggaaaaagcaaagaagctgaagaaattcttcactccatggtcatgaagggcctgaaacctgacatcgtctcgtacagtactctgcttcacgggtatgccaccgaaggatgcttagttggtatgactaatctcttcaattcaatgactagatatggcattcgccctaacagtcatgcttttaacatactgattaatgtatgtgctaaatctggcatgatggatgaggctatgcttatatttaaagaaatgcagaagcgaggagtgagtccaaatctagtcacctattcaactgtaatacatgcattttgcaaaatgggtagcttggacattgctatggacaaatttaaccagatggttgatataggagtacgaccggatgcaattgtttatcgttccctaatccatggtttttgtacacatggggatttagtgaaaccaaaggaattggttactgaaatgaggaacaaaggtatgcgtcctcctgatattaagttcttccattcaataatgcagaacctatgcacggaaggaagggtaatagaagcacgggatatcctcgacttgatagtgcgcattggtatgaggcctgatgttttcatatttaatatactgatcggtggatactgcctagtccgcaagatggcagatgcatcaaaaatatttgatgatatggtgtcatatggtttagaaccttcaaatattacgtatggtatacttattaatggctattgcaaaaacagaaggattgatgaggggctgattctattcaaagaaatgttgtgcaagggacttaaacctacaacttttaactataacgtcatactggatggactatttctggctggacgaactgttgctgcgaaggagaagtttgatgagatggttgaatctggagtaagtgtgtgcatcgatacttactctatatttcttgctggactttgcagaaataattgctttagtgaagtaatcatgctgttccagaaattaagcgcaatgaacatgaaattcaatattagaattgtcaatatcatgattgatgccttctacaaggttcggcgaaaccatgaagctaaggatttgtttgccgcaataccatccaatggcttggtagctaatgttgttacctacagcataatgatgacaaatctgataaaagaaggttcagtggaagaagctgacactctctttttatcaatggagaagagcggctgtactgcaaactcttggatgttaaatcatattatcagaaggttactggaaagaggagagatagtcaaggctggaaattatatgtcgaaagttgatgcaaagagctactcacttgaagctaaaactgttttgctgctgatctctctcttttcagggaaagggaaatatagagaacacataaaattgctccctatgaagtatcagtttctcgaagaaccagacacagttgaa

SEQ ID NO: 1850 - DNA, 2445 bp, Triticum aestivum
  source 1..2445: mol_type = genomic DNA
atgagtactagtagtagtacatgctcattggtacaacttggaaaagcactccactcgtcttgctcccggttccaccacgccatgcctcgcctctcctccaccacgccaatgtcgccaccccacctccgcctccgactcggcgcccgccactcctcctccacctctcatctctcacgcatctgggatccccacgccgccttcgccgcagccacggagcgtgtgcgctctggcagcctcaccccggcggacgcccaccacctgttcgacgaattgctccggcagaccaatcctgtccaggagcaacccctcaacaaccttctcgccgccctcgcccgcgctccggcgtccaacgcctgcagagacggccctgcactcgcggtcgccctcttcagccgcatatcccaaggcgcccgcctatgggtggtgcagccaacggcttgcacctacggcatcctcatggactgctgctgccgtgcacatcgcctggatctggcgtttgccttcttcggccgtctcctcaggacgggactgaaggcaggcgtcattcaactctgcactcttctcaagggcctttgccgcgcagagcgggctgatgaggccatggacgtgctgcttcataggatgcctgagctgggctgcacccccaacgtggtggcctataccacggtcatccacggcttcttgaaggaaggccaagtaggcaaggcatgcaatctattccatggaatggcgcagcagggcgttgcacctaatgtggtgacatataactcggttatcgatgcgctatgcaaggccagggccatgggaaaggcagagatggtccttggtcaaatggttgttaatggtgttggaccgagtaacgtgacatataatactctcatccatggatattcctcttcaggtcatcagaaggaggcagttagggtgctgaaagaaatgagaagtcagggtatcataccagatgtttttacttgcagctcgctcatggcctccctttgcaacaacggaaaaagcaaagaagctgaagaaattcttcactccatggtcatgaagggcctgaaacctgacatcgtctcgtacagtactctgcttcacgggtatgccaccgaaggatgcttagttggtatgactaatctcttcaattcaatgactagatatggcattcgccctaacagtcatgcttttaacatactgattaatgtatgtgctaaatctggcatgatggatgaggctatgcttatatttaaagaaatgcagaagcgaggagtgagtccaaatctagtcacctattcaactgtaatacatgcattttgcaaaatgggtagcttggacattgctatggacaaatttaaccagatggttgatataggagtacgaccggatgcaattgtttatcgttccctaatccatggtttttgtacacatggggatttagtgaaaccaaaggaattggttactgaaatgaggaacaaaggtatgcgtcctcctgatattaagttcttccattcaataatgcagaacctatgcacggaaggaagggtaatagaagcacgggatatcctcgacttgatagtgcgcattggtatgaggcctgatgttttcatatttaatatactgatcggtggatactgcctagtccgcaagatggcagatgcatcaaaaatatttgatgatatggtgtcatatggtttagaaccttcaaatattacgtatggtatacttattaatggctattgcaaaaacagaaggattgatgaggggctgattctattcaaagaaatgttgtgcaagggacttaaacctacaacttttaactataacgtcatactggatggactatttctggctggacgaactgttgctgcgaaggataagtttgatgagatggttgaatctggagtaagtgtgtgcatcgatacttactctatatttcttgctggactttgcagaaataattgctttagtgaagtaatcatgctgttccagaaattaagcgcaatgaacatgaaattcaatattagaattgtcaatatcatgattgatgccttctacaaggttcggcgaaaccaagaagctaaggatttgtttgccgcaataccatccaatggcttggtagctaatgttgttacctacagcataatgatgacaaatctgataaaagaaggttcagtggaagaagctgacactctctttttatcaatggagaagagtggctgtactgcaaactcttggatgttaaatcatattatcagaaggttactggaaagaggagagatagtcaaggctggaaattatatgtcgaaagttgatgcaaagagctactcacttgaagctaaaactgttttgctgctgatctctctcttttcagggaaagggaaatatagagaacacataaaattgctccctatgaagtatcagtttctcgaagaaccagacacagttgaa

SEQ ID NO: 1851 - DNA, 2376 bp, Triticum aestivum
  source 1..2376: mol_type = genomic DNA
atgcctcgcttctcctccaccacgcccatgtcgccactccgcctccgcctccgcctccgcctccgactcggcgcccgccactcctcctccacctcccattcctcacgcagctgggatccccactccgccttcgccgccgccgcggagcgtgcgcgctctggcaaccttaccccggaggacgcacaccacctgttcgacgaattgctccggcagggcaatcctatccaggaccgccccttgaacaaacttctctccgccctcgcccgtgctccggcgtccgcgacctgcagaaacggccctgcactcgcggtcgccctcttcagccgcatatcccaaggtgcccgccgacgtgtggcagagccaacggcctgcacctacggcatcctcatggactgctgctgccgcgcacaccgcctcgatctggtgttcgctttcttcggccgtctcctcaggacgggacttaaggcaggcgtcattcaagtttgcactcttctcaagggcctctgccgcgcaaagcgggctgatgaggctctcgacgtgctgcttcacaggatgcctgagctgggctgcactcccaacgtggtggcatataccacggtcatccacggcttctttaaggaaggccaagtaggcaaggcatgcaatctgttccatggaatggcgcagcagggtgttgcgcctaatttggtgacatataactcggttattgatgcgttgtgcaaggccaaagcaatggacaaggcagagtatttccttggtcagatggttgatgatggtgttgtacctgataatgtgacatataatagcctcatccatggatattcctcttcaggccactggaaggaggcagttagggtattcaaagagatgacaagtcggagggttacagcagatgtgcatacttacaacatgtttatgacctttctttgcaaacatggaagaagcaaagaagctgcaggaatttttgataccatggctatgaagggcctgaaacctgacaacgtttcatatgctattctccttcatgggtatgccactgaaggatgcttagttgatatgattaatctcttcaattcaatggaaagagattgtattctacctgactgtcgtatcttcaacatactgattaatgcatatgctaaatctgggaagcttgataaggctatgcttatcttcaatgaaatgcagaaacaaggagtgagtccaaatgcagtcacatattcaactgtaatagatgcattttgcaaaaagggtcagttggacgatgctatgataaagtttaatcagatgattgatacaggagtacgacagggcacagctatttatggttctctaatccagggtttttgtacacacggcgatttggtgaaagcaaaggaattggctactgaaatgatgaacaaaggtatacctcctcctgatattaagttcttccattcaatcatgcagaacctttgcacagaaggaagggtaatagaagcacgggatgtccttggcttgatagcgcacataggtatgaggcctaatgtttgcacatttaatatactgatcggtggatattgcctagtcggcaagatggaggatgcctcaaaaatatttgacgatatgatgtcatatggcttagaaccttctaatattacgtatggtatacttattaatggctattgcaaaaacgaaaggattaacgatgggctgattctgttcaaagaaatgttgcgcaagggacttaaacctacaacttttaattacaacgtcatactagatggattatttttggctggacgaactgttgctgcaaaggaaaagtttgatgagatggttgaatttggagtaagtgtgtgcattgatacatattcgatagttcttggtggactttgtagaaataattgtagcggcgaagcaatcacgctattccagaaattaagcacaatcgatgtgaaattcaatattacaattgtcaatataatgattgatgccttctacagggttcagcgaaaccaagaagccaaggatttgtttgctgcagtatcagccaatggtttggtagctaatgtctttacctacaccataatgatgaaaaatcttataaaagaagggtcagtggaagaagctgacgatctctttttatcaatggagaagagcggctgtactgctgactcttatatgttaaatcttatcgtcagaatgttactgggaaaaggagagatagtcaaggctgggaattatatatctaaaattgatgcaaagagctactcacttgaagctaaaactgtttcgctgcttatctctctcttttcagggaaagggaaatatagagaacacataggattgctccctgcaaagtatcggtttcgtgaagaagcagccacagttgtg

SEQ ID NO: 1852 - DNA, 804 bp, Triticum aestivum
  source 1..804: mol_type = genomic DNA
atgcctcgcttctccgccgccacgcccatgtcgccactccgcctccgcctccgcctccgcgcccgccactcctcctccacctcccattcctcacgcagctgggatccccactccgccttcgccgccgccgcggagcgtgcgcgctctggcaacctcaccccggaggacgcacaccacctgttcgacgaattgctccggcagggcaatcctgtccaggaccgccccttgaacaaacttctctccgccctcgcccgtgctccggcgtccgcgacctgcagaaacggccctgcactcgcggtcgccctcttcagccgcatatcccaaggtgcccgccgacgtgtggcagagccaacggcctgcacctacggcatcctcatggactgctgctgccgcgcacaccgcctcgatctggtgttcgctttcttcggccgtctcctcaggacgggacttaaggcaggcgtcattcaagtttgcactcttctcaagggcctctgccgcgcaaagcgggctgatgaggctctcgacgtgctgcttcacaggatgcctgagctgggctgcactcccaacgtggtggcatataccacggtcatccacggcttctttaaggaaggccaagtaggcaaggcatgcaatctgttccatggaatggcgcagcagggcgttgcgcctaatttggtgacatataactcggttattgatgcgttgtgcaaggccaaagcaatggacaaggcagagtatttccttggtcagatggttgatgatggtgtcgtacctgataatgtgacatataatagcctcatccat

SEQ ID NO: 1853 - DNA, 2376 bp, Triticum aestivum; identical to SEQ ID NO: 1851
  source 1..2376: mol_type = genomic DNA

SEQ ID NO: 1854 - DNA, 2370 bp, Triticum aestivum
  source 1..2370: mol_type = genomic DNA
atgcctcgcttctcctccaccacgcccatgtcgccactccgcctccgcctccgcctccgactcggcgcccgccactcctcctccacctcccattcctcacgcagctgggatccccactccgccttcgctgccaccgcggagcgtgcgcgctctggcaacctcaccccggaggacgcacaccacctgttcgacgaattgctccggcagggcaatcctatccaggaccgccccttgaacaaacttctctccgccctcgcccgtgctccggcgtccgcgacctgcagaaacggccctgcactcgcggtcgccctcttcagccgcatatcccaaggtgcccgccgacgtgtggcagagccaacggcctgcacctacggcatcctcatggactgctgctgccgcgcacaccgcctcgatctggtgttcgctttcttcggccgtctcctcaggacgggacttaaggcaggcgtcattcaagtttgcactcttctcaagggcctctgccgcgcaaagcgggctgatgaggctctcgacgtgctgcttcacaggatgcctgagctgggctgcactcccaacgtggtggcatataccacggtcatccacggcttctttaaggaaggccaagtaggcaaggcatgcaatctgttccatggaatggcgcagcagggtgttgcgcctaatttggtgacatataactcggttattgatgcgttgtgcaaggccaaagcaatggacaaggcagagtatttccttggtcagatggttgatgatggtgttgtacctgataatgtgacatataatagcctcatccatggatattcctcttcaggccactggaaggaggcagttagggtattcaaagagatgacaagtcggagggttacagcagatgtgcatacttacaacatgtttatgacctttctttgcaaacatggaagaagcaaagaagctgcaggaatttttgataccatggctatgaagggcctgaaacctgacaacgtttcatatgctattctccttcatgggtatgccactgaaggatgcttagttgatatgattaatctcttcaattcaatggaaagagattgtattctacctgactgtcgtatcttcaacatactgattaatgcatatgctaaatctgggaagcttgataaggctatgcttatcttcaatgaaatgcagaaacaaggagtgagtccaaatgcagtcacatattcaactgtaatagatgcattttgcaaaaagggtcagttggacgatgctatgataaagtttaatcagatgattgatacaggagtacgacagggcacagctatttatggttctctaatccagggtttttgtacacacggcgatttggtgaaagcaaaggaattggctactgaaatgatgaacaaaggtatacctcctcctgatattaagttcttccattcaatcatgcagaacctttgcacagaaggaagggtaatagaagcacgggatgtccttggcttgatagcgcacataggtatgaggcctaatgtttgcacatttaatatactgatcggtggatattgcctagtcggcaagatggaggatgcctcaaaaatatttgatgatatgatgtcatatggcttagaaccttctaatattacgtatggtatacttattaatggctattgcaaaaacgaaaggattaacgatgggctgattctgttcaaagaaatgttgcgcaagggacttaaacctacaacttttaattacaacgtcatactagatggattatttttggctggacgaactgttgctgcaaaggaaaagtttgatgagatggttgaatttggagtaagtgtgtgcattgatacatattcgatagttcttggtggactttgtagaaataattgtagcggcgaagcaatcacgctattccagaaattaagcacaatcgatgtgaaattcaatattacaattgtcaatataatgattgatgccttctacagggttcagcgaaaccaagaagccaaggatttgtttgctgcagtatcagccaatggtttggtagctaatgtctttacctacaccataatgatgaaaaatcttataaaagaagggtcagtggaagaagctgacgatctctttttatcaatggagaagagcggctgtactgctgactcttatatgttaaatcttatcgtcagaatgttactgggaaaaggagagatagtcaaggctgggaattatatatctaaaattgatgcaaagagctactcacttgaagctaaaactgtttcgctgcttatctctctcttttcagggaaagggaaatatagagaacacataggattgctccctgcaaagtatcggtttcgtgaagaagcagccacagttgtg

SEQ ID NO: 1855 - DNA, 2319 bp, Triticum aestivum
  source 1..2319: mol_type = genomic DNA
atgtcaaacacccgtctgtcctccaccttcacctcctccttgaaggctccttcacgaaaaccacgagccccccgcctcgccgccttggctgccgccacggagcgcgtccgcgctggaacgctaactcggcaggacgcgcgccagctgttcgacgaattgctgagccaagccgcgacagtcccagtacgcaccctgaacaactttcttgccgcactctcccgtgctccaccctcagctgcctgcagcgatggcccgggccttgccattgccctcttcaaccacatgtcccaaggcgctggtgcacgggtggtgtcgcccacgctctgtacctattccatcctcatggactgctgctgtcgtgcacgccgcccggacttggtggtttccttctttggccgcctccttaggttggggctgcgcttgaatgtcatctccttcaacaatctcctcaaggggctctgccaggccaagcgtacaaatgaggcggtggacttgctgctccaccggacacctgaactggactgtgtgcctaatgtcttctcgtacagcatcgtaatcaacgggtgttttaaacaaggtgaagtagacaaagcgtgcaatctcttcaatcagatgccccaactgggagttcaacctgatgtggtgatctacaactcaattatcgacgcactaagcaaatccggagcaatggacaaggcagaagtggtccttcggcaaatggttgatcaaggcattggaccaaacgtcatgacatatactagcctgatccatggatattccgcttcgggtcagtggaaggcggcagttagagtattcaaggaaatggtaagtgttggtgttcaaccaaatgctgtcgctttgaactcatttatggattcactttgcaagcatagaaggacaaaggaagctagagatatttttgactccatggctgcaaagggccagaaacctgatattttctcctattctactatgcttaacgggtatgtgaaagaaggatgctttgatgatatgactggtctcttcaatttgatgctacagaatggtgttgtacgaaaccaccatattttcaacatactgatcaatgcatatgctaaacgtggactgatggatgaggctatgcacatgttcgaagtaatgaggcaacaaggagtaaacccagatgtatttagctatcaaattgtaatggattcactttgcaaaatgggtaggatggatgctgctctggacaaatttaatcagatggtcaatcaaggagtttcacctaacatagttgtttaccgatgcctggttctgggttcttgctctcatggtgattttgtgaaagccaaggaattgatttctgaagcagttaatagaggtttgtgttctaacagtgtgttcttctatcctgtaataaacaatctgagcaaagaaggaaaggtaaaggaggcacaggatatgtttgacttcattgtaggtattggtcagcggcctgatgttattatgtaccattcactgatggatggatattgccttgttggcaaggtggaggaagcactgagagtacttgatgctatgaagtttgctggcctccaacctactgctgttacatacgctatacttcttaatggctactgtaaaagtggaaggattgctgctgggttgagtcttttcatggaaatgtcactcagcggggttaagcccactactattatgtacaacattatacttgatgggctgtttcgctccgggagaacagtttctgcaaaggaaaaattccgtacgatgagcgaaagtggcataccagtgggcattgacacatacaacatagttcttagtggactttgtaaaaataattgcgctggtgaagcaatagagctgttcaagaaactacgtgcaatgaatgtgaagattgatgtcaaaacactcactatcatgatttctgcaatgtttaaaagtaggagaattgaagaagccaaggagttgtttgctactatatcagccatcgggttggtgccttctgttgtgacttacagtgtaatgatgacgaatttcataaaagaagggtcgctggcagaggctgatgatatgtttttagcaatggagaaggctagctgtgctcccaactccatcctgctaaatcaagtggtcagggcgttgctggaaaaaggtgtagttgtaaaggctgcaacttatctggctaaacttgatgcaaaacagctgtcacttgaagcttcaacggtttcgttaatactatctctcttctcaaggaaagggaaattaagggagcatgtaaaattgcttccggtgaagtaccagcctcctgagatgttggac

SEQ ID NO: 1856 - DNA, 2472 bp, Triticum aestivum
  source 1..2472: mol_type = genomic DNA
atgtcccgcctccgccactccacctccaccgcgccggtgccccacctccgcctcctccgctgccgctcctcctccatctccaccttgccgccgtcacgctcatcgtctccccatgcagcctttgccgcagccacagagcgcgtcagcgctgggacgctcagcccggaagacgcacaccgcctgttcgacgaattgctacggcaggccactccggtccccgcgcgctccctgaacggcttcctcacggccctctcccgtgcgccggacaccggcgcctgcagagacggccccgccctcgccctctccctcttcaaccgcacccgccgagaagcggccggctcccgggtggtgtcgtccacaatcttcacctacggcatcctcatgaactgctgctgccgcacgcgtcgtccggagcttgggcttgccttctttgggcgcgtcctcaggatgggcctgaagacaaacgtggtcgtcgccaccacggtcctccagtgcctctgcggcgccaaacggacagacgaggctgtggacatcctgctacatcggatgtccgagctcgggtgcgtgcctgacgacttctcatacaacattgttctgaagagcttatgcgatgatagcaggagccagcgggcactcgacctgctccggatgtgggagaatgaacgaggtgtctgctcccccaacgtatatacgtataacacggtcatccacggcttctttaaggaaggtgaagtaagcaaggcatgtaatctatttcatgaaatggcgcagaaaggggttccgcccaatgtggtgacatatagcttgactattgatgcgctgtgcaaggccagagctatggacaaagcacagttgttcctccggcagatgattcataaaggtgttcgaccgaacattgtgacatataatgtcatgatccatggatattccactcttggccagtggaaagaagcaggtaaaatgttcagagaaatgacaggacagggactcataccagatattgttacttggacctcgttcatggcctctctctgtaagcatggaagaaccaaagaagctgccgaattttttgattccatgactgccaagggccacaagcctgatttggtcatgtatcatgttctgctccatgggtatgcaaccgaaggatgctttgctgatatgattaatctctttaattcaatggcaaccaaaggtattgtacccgatcgtcaggttttcaatattttaattgatgcacatgctaaacatggaatgatggatgaagctatgcacatatttactggaatgcagggacaaggagtgtgtccagatgtatggacctattcaactctaatatctgcactttgcagaatgggtaggctggctgatgccatggataacttcagtcagatgattggtaagggagtacaaccgaacacagttgtttatcactccctaattcagggtttctctacacatggtgatttgaggaaagcaaatgagttggtttatgaaatgacgaacaaaggtattccttgtccaaacattgcattcttcagttctataatggacagtctatgcaaagaaggaagggttatggatgcacatgatatcttccacttggttacagacataggtctgaaacctaacatcattacgtttaatacgctgattgatggacattgcttagtcggtgagatggagaaagcatttggagtacttgattccatggtatcagctggcattgaggctgatgtttttacatataatacacttgcttatggctattgtagatgtggaaggattgatgatgggttgattctattcagagaaatgttgcaaaacaaacctaaacccacaacaatcacatataacatcatactggatgggttatttcgtgctgggagaacatttgctgcaaagaaaatgttcgttgagatgatcgaaacgggaataacagtgagcatttccacatacagtataatacttggaggactttgtaggaataattgctctgacgaagcgatcaccctatttcagaaattaggagcaatgaatgtgaagtttgatattaaaatactcaataccatgatcaatgccatgttcaaggttcggagaagagaagaagctaacggtttgtttgctgcaatatcagccagtgggatggtacctaatacttctacctacagcgtaatgataggaaatcttctaaaagaaggatcagtggaagaagctgaaaatatgttctcattaatggagaagagtggttgtgctccagactctcgtcttataaataatatcatcagaatattgttggaaaacggtgacatcgtcaaggctggaaattatatgtctaaagttgatggcaagagcatctcacttgaagcttcaactacttcgttgttgatgtgtctcttttcaagtaaagggaaatatcgggaacaaatcagtttgctccctgtaaattaccaatttttcaatggagtcggt

SEQ ID NO: 1857 - DNA, 663 bp, Triticum aestivum
  source 1..663: mol_type = genomic DNA
atgcctcgcttctcctccaccacgccgctgtcgccactccgccgccgcctccaccactcctcctccacctcccattcctcacgcagctgggagccccacgccgccttcgccgccgccacggagcgtgcgcgctctggcaacctcaccctggaggacgcacaccacctgttcgacgaattgctccggcagggcaatcctgtccaggaccgccccttgaacaaacttctctccgccctcgcccgtgctccggcgtccgcggcctgcagaaatggccctgcactcgcggtcgccctcttcagccgcatatcccaaggtgcccgccgacgagtggcggagccaacggtctgcacctacggcatcctcatggactgctgctgccgcgcacaccgcctggatctggcgctcgccttcttcggccatctcctcaagacgggcctggaggtagaccaagtcgtcttcaacaccctcctcaaaggcctttgccacgcaaagcgggcggatgaggctctggacgtgctgcttcacaggatgactgagctgggctgcacccccaacgtggtggcgtacaacaccataatccatggcttctttaaggaaggtcaagtaagcaaggcctgcaatctgttccatgaaatggcgcagcaggcgttccgcctaatgtgg

SEQ ID NO: 1858 - DNA, 1644 bp, Triticum aestivum
  source 1..1644: mol_type = genomic DNA
atggacaaggcagaggtggtccttcgtcaaatgattgatcgtagtgttggacctaatagcgtgacgtatagtagcctcatccatggatattcctcttcaggccactggaaggaggcagttagggtattcaaagagatgacaagtcggagggttacaccaaatgtgcatacttacaacatgtttataacctttctttgcaaacatggaagaagcaaagaagctgcaggaatttttgattccatggctatgaagggcctgaaacctgacgacgtttcatatgctattctccttcatgggtatgccaccgaaggatccttagttgatatgattaatctcttcaattcaatggaaagagactgtatcctaccagactgtcgtatcttcagcatactgattaatgcatatgctaaatctgggaaggttgataaggttatgcttatcttcaaaaaaatgcagaaacaaggagtgagtccagatgcagtcacatattcaaccctaatagatgcattttgtaaaaagggtcggttggacgatgctatgataaagtttaatcagatggttgatacaggagtacgacagggcacagctgtttatggttctctaatccagggtttttgtacacacggtgatttggtgaaaggaaaggaattggttactgaaatgatgaacaaaggtatacctcctcctgatattaagttcttccattcaatcatgcagaacctatgcacagaaggaagggtaatagaagcacgggatatccttggcttgatagcacacataggtatgaggcctaatgtttgcacatttaatatactgatcggtggatactgcctagtccgcaagatggagggtgcctcaaaaatatttcatgatatgatgtcatatggtttagaaccttctaatattacgtatggtatacttattaatggctattgcaaaaacttaaggattgacgatgggctgattctgttcaaagaaatgttgcgcaagggacttaaacctacaactttaaattataacattatactggatggcttatttctggctggacgaactgctgctgcaaaggaaaggttccatgagatggttgaatctggagcacatgtgtgcattgatacatactgtatagttcttggtggactttgtagaaataactgcagtagcgaagcaatcaccctattcgggaaattaagtgcaatgaatgtgagatttgatattacaattgtcaatatcattattggtgcattctacagggtcgagagaaaccaagaggctaaggatttgtttgctgctatgccagccaattgcttggttcctaatgctgttacctacaccataatgatgacaaatcttataaaagaaggttcagtggaagaagctgacaatctttttttatcgatggagaagagcggctgtactgccaactcttgcctgttaaatcatgtcatcaggaggttactggaaaaaggagagatagtcaaggctggaaattatatgtataaagttgatgcaaagaactactcacttgaagctaaaactgtttcactgctgatgtctctgtttacaaggaaagggaaatatagagaacacatcaaattgctccctgcaaagtatcagtttctggaagaagcagccacagttgaa

SEQ ID NO: 1859 - DNA, 2352 bp, Triticum aestivum
  source 1..2352: mol_type = genomic DNA
atgcctcgcttctcctccaccacgccgctgtcgccactccgccgccgcctccgccactcctcctccacctcccattcctcacgcagctgggagccccacgccgccttcgccgccgccacggagcgtgcgcgctctggcaacctcaccctggaggacgcacaccacctgttcgacgaattgctccggcagggcaatcctgtccaggaccgccccttgaacaaacttctctccgccctcgcccgtgctccggcgtccgcggcctgcagaaatggccctgcactcgcggtcgccctcttcagccgcatatcccaaggtgcccgccgacgagtggcggagccaacggtctgcacctacggcatcctcatggactgctgctgccgcgcacaccgcctggatctggcgctcgccttcttcggccatctcctcaagacgggcctggaggtagaccaagtcgtcttcaacaccctcctcaaaggcctttgccacgcaaagcgggcggatgaggctctggacgtgctgcttcacaggatgactgagctgggctgcacccccaacgtggtggcgtacaacaccataatccatggcttctttaaggaaggtcaagtaagcaaggcctgcaatctgttccatgaaatggcgcagcagggcgttccgcctaatgtggtgacatataattcagttatcgatgcgctgtgcaaggccagagccatggacaaggcagaggtggtccttcgtcaaatgattgatcgtagtgttggacctaatagcgtgacgtatagtagcctcatccatggatattcctcttcaggccactggaaggaggcagttagggtattcaaagagatgacaagtcggagggttacaccaaatgtgcatacttacaacatgtttataacctttctttgcaaacatggaagaagcaaagaagctgcaggaatttttgattccatggctatgaagggcctgaaacctgacgacgtttcatatgctattctccttcatgggtatgccaccgaaggatccttagttgatatgattaatctcttcaattcaatggaaagagactgtatcctaccagactgtcgtatcttcagcatactgattaatgcatatgctaaatctgggaaggttgataaggttatgcttatcttcaaaaaaatgcagaaacaaggagtgagtccagatgcagtcacatattcaaccctaatagatgcattttgtaaaaagggtcggttggacgatgctatgataaagtttaatcagatggttgatacaggagtacgacagggcacagctgtttatggttctctaatccagggtttttgtacacacggtgatttggtgaaaggaaaggaattggttactgaaatgatgaacaaaggtatacctcctcctgatattaagttcttccattcaatcatgcagaacctatgcacagaaggaagggtaatagaagcacgggatatccttggcttgatagcacacataggtatgaggcctaatgtttgcacatttaatatactgatcggtggatactgcctagtccgcaagatggagggtgcctcaaaaatatttcatgatatgatgtcatatggtttagaaccttctaatattacgtatggtatacttattaatggctattgcaaaaacttaaggattgacgatgggctgattctgttcaaagaaatgttgcgcaagggacttaaacctacaactttaaattataacattatactggatggcttatttctggctggacgaactgctgctgcaaaggaaaggttccatgagatggttgaatctggagcacatgtgtgcattgatacatactgtatagttcttggtggactttgtagaaataactgcagtagcgaagcaatcaccctattcgggaaattaagtgcaatgaatgtgagatttgatattacaattgtcaatatcattattggtgcattctacagggtcgagagaaaccaagaggctaaggatttgtttgctgctatgccagccaattgcttggttcctaatgctgttacctacaccataatgatgacaaatcttataaaagaaggttcagtggaagaagctgacaatctttttttatcgatggagaagagcggctgtactgccaactcttgcctgttaaatcatgtcatcaggaggttactggaaaaaggagagatagtcaaggctggaaattatatgtataaagttgatgcaaagaactactcacttgaagctaaaactgtttcactgctgatgtctctgtttacaaggaaagggaaatatagagaacacatcaaattgctccctgcaaagtatcagtttctggaagaagcagccacagttgaa

SEQ ID NO: 1860 - DNA, 2334 bp, Triticum aestivum
  source 1..2334: mol_type = genomic DNA
atgccgaccggccggctgtcctccatcttcaccagcaatgcaacctcctccttcagggctccttcgccacagccacgagcccctctcgccgccttggctgccgccacagagcgcgtgtgtgacggaacgctaagaccggaggaggcgcaccacctgttcgacgaattgctgagccaagccgccgccgtcccggaacgcgggctgaacaactttcttgccgcactagcccatgctccaccctcatctacctgcagcgatggcccgggccttgccatcgccctcttcaaccgcatgtcccgaggcgctggtgcacgggtggtgtcgcccacgctctgtacctattccattctcatggactgctgctgccgtgcaggccgcccggacttggtggttgccttctttggccgcctcctcagattggggctgtgcttgaatgtcatctccttcaacaacctcctcaaggggctctgccaggtcaagcgtacaaatgaggctgtggacttgctgctccaccggacacctgaactggactgtgtgcctaatgtcttctcgtacagcatcgtaatcaacggctgttttaaacaaggcgaagtagacaaagcgtgcaatctcttccatcagatgatccaactgggagttcaacctaatttggtgatctacaactcaattatcgacgcactaagcaaatccggagcaatggacaaggcagaagtggtccttcggcaaatggttgatcaaggaattgaacccaacatcaggacatatactagcctgatacatggatattccgcttcgggtcagtggaaggcggcagctagagtattcaaggaaatggtaagtgttggtgttctaccagatgctgtcgcgtggaactcatttatggattcactttgcaagcatagaaggacaaaggatgctagagttatttttgactccatggctgcaaagggccaaaaacctaatattgtctcctactctattatgctaaatgggtatgctaaagaaggatacttcgatgatatgactggtctcttcaatttgatgctacagaatggtattgtacctaaccaccatgttttcaacatactgatcaatgcatattctaaacgtgggctgatggatgaggctatgcacatgtttgaagtaatgaggcaacaaggagtaaacccagatgtatttggctatcaaattgtaatggattcactttgcaaaatgggtagggtggatgctgctctggacaaatttaatcagatggtcaatcaaggagtttcacccaacaaagctgtttaccaatgcctggttctgggttcttgctctaatggtgattttgtgaaagccaaggaattgatttctgaagcagttaatagaggtctgtgttctaacagtgtattcttctatcctgtaataaacaacctgagcaaagaaggaaaggtgaaggatgcacaggatatgtttgacttcattgtgggtattggtcgtccgcctgatgttattatgtacaattcactgatggatggatattgccttgttggcaaggtggaggaagcactgagagtacttgatgctatgaagtctgctggcctccaacctgatgcttttacatatggtatacttcttaatggctactgtaaaattggcaggatcgccgatggattgagtcttttcagggaaatgtcactcagcggggttaagcccacagctattatgtacaacattatacttgatgggctgtttcgctccgggagagcagtttctgcaaaggaaaaattctgtacgatgagcgaaagtggcataccagtgggcattggcacatacaacatagttcttcatggactttgtagaaacaattgcactgatgaagcaatagagctgttcaacaaattacgtgctatgaaattgaagattaatgtcataacaatcaataccatgatttctgctatgtttaaaactaggagaattgaagaagccaaggatttgtttgctactatatcagccattgggttggtgccttctgttgtgacttacagtgtaatgatgacgaatttcataaaagaagggttgctggcagaggctgatgatatgtttttagcaatggagaaggctggctgtgctcctgactccagactgctaaatcacgtggtcagagtgttgctggagaatggtgcagttgtaaaggctgcaacttatctcgctaaacttgatgcaaaccatctgtcacttgaagtttcaacgatttcattaatagtatctctcttctcaggggaagggaaactaagggagcatgtagagttgcttccagtaaagtaccagcctcctgagagttcggctgacaat

SEQ ID NO: 1861 - DNA, 2334 bp, Triticum aestivum
  source 1..2334: mol_type = genomic DNA
atgccgaccggccggctgtcctccatcttcaccagcaatgcaacctcctccttcagggctccttcgccacagccacgagcccctctcgccgccttggctgccgccacagagcgcgtgtgtgacggaacgctaagaccggaggaggcgcaccacctgttcgacgaattgctgagccaagccgccgccgtcccggaacgcgggctgaacaactttcttgccgcactagcccatgctccaccctcatctacctgcagcgatggcccgggccttgccatcgccctcttcaaccgcatgtcccgaggcgctggtgcacgggtggtgtcgcccacgctctgtacctattccattctcatggactgctgctgccgtgcaggccgcccggacttggtggttgccttctttggccgcctcctcagattggggctgtgcttgaatgtcatctccttcaacaacctcctcaaggggctctgccaggtcaagcgtacaaatgaggctgtggacttgctgctccaccggacacctgaactggactgtgtgcctaatgtcttctcgtacagcatcgtaatcaacggctgttttaaacaaggcgaagtagacaaagcgtgcaatctcttccatcagatgatccaactgggagttcaacctaatttggtgatctacaactcaattatcgacgcactaagcaaatccggagcaatggacaaggcagaagtggtccttcggcaaatggttgatcaaggaattgaacccaacatcaggacatatactagcctgatacatggatattccgcttcgggtcagtggaaggcggcagctagagtattcaaggaaatggtaagtgttggtgttctaccagatgctgtcgcgtggaactcatttatggattcactttgcaagcatagaaggacaaaggatgctagagttatttttgactccatggctgcaaagggccaaaaacctaatattgtctcctactctattatgctaaatgggtatgctaaagaaggatacttcgatgatatgactggtctcttcaatttgatgctacagaatggtattgtacctaaccaccatgttttcaacatactgatcaatgcatattctaaacgtgggctgatggatgaggctatgcacatgtttgaagtaatgaggcaacaaggagtaaacccagatgtatttggctatcaaattgtaatggattcactttgcaaaatgggtagggtggatgctgctctggacaaatttaatcagatggtcaatcaaggagtttcacccaacaaagctgtttaccaatgcctggttctgggttcttgctctaatggtgattttgtgaaagccaaggaattgatttctgaagcagttaatagaggtctgtgttctaacagtgtattcttctatcctgtaataaacaacctgagcaaagaaggaaaggtgaaggatgcacaggatatgtttgacttcattgtgggtattggtcgtccgcctgatgttattatgtacaattcactgatggatggatattgccttgttggcaaggtggaggaagcactgagagtacttgatgctatgaagtctgctggcctccaacctgatgcttttacatatggtatacttcttaatggctactgtaaaattggcaggatcgccgatggattgagtcttttcagggaaatgtcactcagcggggttaagcccacagctattatgtacaacattatacttgatgggctgtttcgctccgggagagcagtttctgcaaaggaaaaattctgtacgatgagcgaaagtggcataccagtgggcattggcacatacaacatagttcttcatggactttgtagaaacaattgcactgatgaagcgatagagctgttcaacaaattacgtgctatgaaattgaagattaatgtcataacaatcaataccatgatttctgctatgtttaaaactaggagaattgaagaagccaaggatttgtttgctactatatcagccattgggttggtgccttctgttgtgacttacagtgtaatgatgacgaatttcataaaagaagggttgctggcagaggctgatgatatgtttttagcaatggagaaggctggctgtgctcctgactccagactgctaaatcacgtggtcagagtgttgctggagaatggtgcagttgtaaaggctgcaacttatctcgctaaacttgatgcaaaccatctgtcacttgaagtttcaacgatttcattaatagtatctctcttctcaggggaagggaaactaagggagcatgtagagttgcttccagtaaagtaccagcctcctgagagttcggctgacaat

SEQ ID NO: 1862 - DNA, 2334 bp, Triticum aestivum; identical to SEQ ID NO: 1860
  source 1..2334: mol_type = genomic DNA

SEQ ID NO: 1863 - DNA, 2334 bp, Triticum aestivum; identical to SEQ ID NO: 1860
  source 1..2334: mol_type = genomic DNA

SEQ ID NO: 1864 - DNA, 2334 bp, Triticum aestivum; identical to SEQ ID NO: 1860
  source 1..2334: mol_type = genomic DNA

SEQ ID NO: 1865 - DNA, 2334 bp, Triticum aestivum; identical to SEQ ID NO: 1860
  source 1..2334: mol_type = genomic DNA

SEQ ID NO: 1866 - DNA, 2310 bp, Triticum aestivum
  source 1..2310: mol_type = genomic DNA
atgccaaccgcccgcctgtcctccatctccacctcctccttcagggctccttcacgagcccccctcgccgccttggctgccgccacggaacgcgttcgcgctggaacgctaagccgggaggatgcacaccacctattcgacgaattgcaaggccaagccgccgccgtcccagtacgcacgctgaacaactttcttgccgcactagcccgtgctccgccctcatccgcctgcagcgatggccctggccttgccatcgccctcttcaaccgcatgtcccgaggcgctggtgcacgggtggtgtctcccacgctctgtacctattccatcctcatggactgctgctgccgtgcaggccgcccggacttggtggttgccttcttctgccgcctcctcaggttggggctgcgctttgaggaggtcatctccttcaacaacctcctcaaggggctttgccaggccaagcgctcaaatgaggctttagatctgctgctccaccggatgcccgaactggactgtgcgcctgatgtcttctcgttcaacatagtaatcaacggctgccttaaagaaggtgaagtagacaaagcatgcaatctcttccatgagatgccccaactgggagttcaacctgatgtggtgacctacaactcaattattgacgcactaagcaagtccggagcaatggacaaggcagaagtgctccttcggcaaatggttgatcaaggaattgaacccaatatcaggacatatagctgtctgatccatggatattctacttttggtcagtggaaggaggcacttagggtattcaaagaaatggcaagtcttggtgttgtaccagacgttgtcacgttaagctcattaatcgattccctttgcaagcacagaaggacaaagcaagctagagaaatttttgactccatggctgcaaagggcctgaaacctgatatcgtctcctactctactatgcttaacgggtatgtcaaagaaggatccttcgaggatatgactgatctcttcaattcgatggtacggaatggtattgtacctaaccaccatattttcaacatactgatcaatgcatatgctaaacgtggactgatggatgaggctatgcacatgttcgaagtaatgaggcaacaaggagtaaacccaaatgtaattgactatctagtaataatggattcactttgtaaaatgggtaggatggatgctgctctggaaaaatttaatcagatggtcaatcaaggagtttcacctaacaaagctgtttaccaatgcctggttctgggttcttgctctcatggtcattttgtgaaagccaaggaattgatctctgaagcaattaatagaggtctgttttctaacagtgtgttcttctatcctgtaataaacgacctgtgcaaagaaggaaaggtgaaggaggcacatgatatgtttgacttcattgtaggtattggtcagcggcctgatgtgattatgtacaattcactgatggatggatattgccttgttggcaaggtggaggaagcactgagactacttgatgctatgaagtctgctggcctccaacctactggtgttacgtatgctatacttcttaatggctactgtaaaattggaaggatcgccgatggattgagtcttttcagggaaatgtcactcagcggggttaagcccactactattatgtacaacattatacttgatgggctgttttgctctgggagaacagtttctgcaaaggaagaattcgatacgatgagcgaaagtggcataccagtgaacgttcgcacatacaacatagttcttagtggactttgtagaaacaattgcactggtgaagcaatagagctgttcaagaaattacgtgctatgaacgtgaagattaatgtcataacactcaataccatgatttctgctatgtttaaaactaggagaattgaagaagccaaggatttgtttgctactatatcagccatcggattggtgccttctgttgtgacttacagtgtaatgatgacgaatttcataaaagaagggctgctagcagaggctgatgatatgtttttagcaatggagaaggctggatgtgctcccaactccagtttgctaaatcaagtggtcagagtgttgctggaaaaaggtgcagctgtacaggctgcaacttatctagctaaacttgatgcaaaacagctgtcacttgaagcttcaacggtttcgttaatactatctctcttctcaaggaaagggaaattaagggagcatgtaaaattgcttccggtaaagtaccagcctcctgagatgttggac

SEQ ID NO: 1867 - DNA, 2043 bp, Triticum aestivum
  source 1..2043: mol_type = genomic DNA
atgtcccgaggcgctggtgcacgggtagtgtcgcccacgctctgtacctattccatcctcatggactgctgctgccgcgcaggccgcccggacttggtggttgccttcttcggccgcctcatcaggttggggctgcgcttggagatcatctccttcagcaatctcctcaaggggctctgccaggccaagcgttcaaatgaggctttggacatgctgctccaccggatgcccgaactggattgtgcgcctgatgtcttctcgttcaacatagtaatcaacggctgctttaaagaaggtgaagtagacaaagcgtgcaatctcttccatgagatgccccaactgggagttcaacctgatgtggtgacctacaactcaattattgacgcactaagcaagtccagagccatggacaaggcagaagtggtccttcggcaaatggttgatcaaggcattgaacccaacatcaggacatatactagcctgatccatggatattccacttcgggtcagtggaaagcagcagttaggatattcaaagaaatggcaagtgctggtgttcgaccaaattctgtcacgttgaactcatttattgattccctttgcaagcatagaaagacaaaggaagctagagatatttttgactccatggctgcaaagggccacaaacctgatattttctcctactctactatgcttaatgggtatgcgaaagaaggatgcttcgatgatatgactgatctcttcaattcgatggtacggaatggtatcgtacctgaccaccatgttttcaatatactgatcaatgcatatgctaaacgtggactgatggataaggctatgcacatgttcgaagtaatgaggcaacaaggagtaaacccaaatgtagttgactatctagtagtaatggattcactttgcaaaatgggtaagatggctgctgctatggatatatttaatcagatggtcaatcaaggagtttcacctaacatagttgtttaccgatgcatggttctgggttcttgctctcatggtgattttgtgaaagccaaggaattgatctctgaagcagttaataaaggtctgtgttctaacagtgtgttcttctatcctgtaataaacaacctgtgcaaagaaggaaaggtaatggaggcacaagatatgtttgactttgacttcattgtcggtattggtcagcggcctgatgttattatgtacacttcacttatggatggatattgccttgttggcaaggtggagaaagcactgagagtactcgatgctatgaaatctgctggcctccaacctactgctgttacgtatggtgcacttcttaatggctactgtaaaattggaaagatcgccgatggattgagtcttttcagggaaatgtcactcagcggggttaagcccactactattatgtacaacattatacttgatgggctgttttgctctgggagaccagtttctgcaaaggaagaatttgatacgatgattgaaagtggcataccagtgggcgttgacacatacaacattgttcttagtgggctttgtaaaaataattgcactgatgaagcaatggatctgttcaagaaactacgtgcaacgaacatgaagattgatgtcataacactcaatatcatgatttctgcaatgtttaaaactaggagaattgaagaagccaaggatttgtttgctactatatcagccatcgggctggtgccttgtgttgtgacatacaacttaatgatgacgaacttcataaaagaagggttgctgccagaggctgatgatatgtttttagcaatggagaaggctaactgtgctcccaactccaggctgctaaatcatgtggtcaggttgttgctggaaaaaggtgcagttgtaaaggctgcaacttatctggctaaacttgatgcaaaccatctgtcacttgaagtttcaacgatttcgttaatagtatctctcttctcaggggaagggaaactaagggagcatgtagagttgcttccagtaaagtaccagcctccggagatgtccatc

SEQ ID NO: 1868 - DNA, 2334 bp, Triticum aestivum
  source 1..2334: mol_type = genomic DNA
atgccaaccggccgcctgtcctccatcttcaccagcaacgcaacctcctccttcagggctccttcgccacaaccacgaccccccctcgccgccttggctgccgccacggaacgcgttcgcgccggaacgctaagccgggaggaggcgcaccacctgttcgacgaattgcaaggccaagccgccgccgtcccggaacgcgggctgaacaactttcttgccgcactagcccgtgctccgccctcatctgcctgcggggatggccctgcccttgccgtcgccctcttcaaccgcatgtcccgaggcgctggtgcacgggtagtgtcgcccacgctctgtacctattccatcctcatggactgctgctgccgcgcaggccgcccggacttggtggttgccttcttcggccgcctcatcaggttggggctgcgcttggagatcatctccttcagcaatctcctcaaggggctctgccaggccaagcgttcaaatgaggctttggacatgctactccaccggatgcccgaactggattgtgcgcctgatgtcttctcgttcaacatagtaatcaacggctgctttaaagaaggtgaagtagacaaagcgtgcaatctcttccatgagatgccccaactgggagttcaacctgatgtggtgacctacaactcaattattgacgcactaagcaagtccagagccatggacaaggcagaagtggtccttcggcaaatggttgatcaaggcattgaacccaacatcaggacatatactagcctgatccatggatattccacttcgggtcagtggaaagcagcagttaggatattcaaagaaatggcaagtgctggtgttcgaccaaattctgtcacgttgaactcatttattgattccctttgcaagcatagaaagacaaaggaagctagagatatttttgactccatggctgcaaagggccacaaacctgatattttctcctactctactatgcttaatgggtatgcgaaagaaggatgcttcgatgatatgactgatctcttcaattcgatggtacggaatggtatcgtacctgaccaccatgttttcaatatactgatcaatgcatatgctaaacgtggactgatggataaggctatgcacatgttcgaagtaatgaggcaacaaggagtaaacccaaatgtagttgactatctagtagtaatggattcactttgcaaaatgggtaagatggctgctgctatggatatatttaatcagatggtcaatcaaggagtttcacctaacatagttgtttaccgatgcmtggttctgggttcttgctctcatggtgattttgtgaaagccaaggaattgatctctgaagcagttaataaaggtctgtgttctaacagtgtgttcttctatcctgtaataaacaacctgtgcaaagaaggaaaggtaatggaggcacaagatatgtttgactttgacttcattgtcggtattggtcagcggcctgatgttattatgtacacttcacttatggatggatattgccttgttggcaaggtggagaaagcactgagagtactcgatgctatgaaatctgctggcctccaacctactgctgttacgtatggtgcacttcttaatggctactgtaaaattggaaagatcgccgatggattgagtcttttcagggaaatgtcactcagcggggttaagcccactactattatgtacaacattatacttgatgggctgttttgctctgggagaccagtttctgcaaaggaagaatttgatacgatgattgaaagtggcataccagtgggcgttgacacatacaacattgttcttagtgggctgtgtaaaaataattgcactgatgaagcaatggatctgttcaagaaactacgtgcaacgaacatgaagattgatgtcataacactcaatatcatgatttctgcaatgtttaaaactaggagaattgaagaagccaaggatttgtttgctactatatcagccatcgggctggtgccttgtgttgtgacatacaacttaatgatgacgaacttcataaaagaagggttgctgccagaggctgatgatatgtttttagcaatggagaaggctaactgtgctcccaactccaggctgctaaatcatgtggtcaggttgttgctggaaaaaggtgcagttgtaaaggctgcaacttatctggctaaacttgatgcaaaccatctgtcacttgaagtttcaacgatttcgttaatagtatctctcttctcaggggaagggaaactaagggagcatgtagagttgcttccagtaaagtaccagcctccggagatgtccatc

SEQ ID NO: 1869 - DNA, 666 bp, Triticum aestivum
  source 1..666: mol_type = genomic DNA
atgctgcacaagggacttaaacctacaacttttaattataacgtcattctggatggattatttctggctagacaaactgttgcttcaaaggtgaagtttcatgagatggctgaatctggagtaagtgtgtgcattgatacatactctatagttcttggtggactttgtagaaataattgcatcggtgaagcaatcacgctatttcagaaattaagtacaatgaatgttaaattcaatattgcaattgtcaatatcatgattggtgcattcttcagggttcggcgaaaccaggaagctaaggatttgtttgctgcagtatcagccaatggtttggtagctaatgtctttacctacactgtaatgatgataaatcttatagaagaagggtcactggaagaagctgacactctctttttatcaatgaagaagagcggctgtactgccaactcttgtatgttaaatcatattatcagaaggttactggaaagaggagagatagtcaaggctggaaattatatgtcgaaagttgatgcaaagagctactcacttgaagctaaaactgttttgctgctgatctctctcttttcagggaatgggaaatatagagaacacataaaattgctccctatgaagtatcagtttctcgaagaagcagccacagttgaa

SEQ ID NO: 1870 - DNA, 984 bp, Triticum aestivum
  source 1..984: mol_type = genomic DNA
atgatgaagaaaggtatgcttcctcctgatattatgttcttcagttcaatcatgcagaacctatgcacagaaggaagggtaatagaagcacgagatatccttgacttgatagtgtgcattggtatgaggcctgatgttttcatatttaatatactgatcggcggatactgcctagtccgcaagatggcagatgcatcaaaaatatttgatgatatggtgtcatatggtttagaaccttgtaatattacgtatggtatacttattaatggctattgcaaaaacggaaggattgatgacgggcttattctgttcaaggagatgctgcacaagggacttaaacctacaacttttaattataacgtcattctggatggattatttctggctagacaaactgttgcttcaaaggtgaagtttcatgagatggctgaatctggagtaagtgtgtgcattgatacatactctatagttcttggtggactttgtagaaataattgcatcggtgaagcaatcacgctatttcagaaattaagtacaatgaatgttaaattcaatattgcaattgtcaatatcatgattggtgcattcttcagggttcggcgaaaccaggaagctaaggatttgtttgctgcagtatcagccaatggtttggtagctaatgtctttacctacactgtaatgatgataaatcttatagaagaagggtcactggaagaagctgacactctctttttatcaatgaagaagagcggctgtactgccaactcttgtatgttaaatcatattatcagaaggttactggaaagaggagagatagtcaaggctggaaattatatgtcgaaagttgatgcaaagagctactcacttgaagctaaaactgttttgctgctgatctctctcttttcagggaatgggaaatatagagaacacataaaattgctccctatgaagtatcagtttctcgaagaagcagccacagttgaa

SEQ ID NO: 1871 - DNA, 1461 bp, Triticum aestivum
  source 1..1461: mol_type = genomic DNA
atgaggattgtcctcaaaagtgccgagaaggactttgtcctatccwcyctcgycmccmtcsymytscwcwsskyttgckmastacacacaaaggccatgcctcgcttctcctccagcacgccaatgtcgccaccacgcctccgcctcctcctcctcctccgacttggcgcccgccactcctcctccacctctcatccctcacgcatctgggatccccacgccgccttcgccgccgcgacgcagcgggctcgctctggcacgctcaccacggaggacgcacaccacctgttcgaagaattgctgcggcagggcaatcctgtccaggagcgtcccttgactaactttctggctgcccttgcccgcgcgcccgcgtccccattctgcagcgatggccccgccctggccgtcgccctcttcagccgtttgtcccgaggcgccggacgacgggtggcacagccaaatgtcttcacctatggagtcctaatggactgctgctgccgtgcgcgccgcttggatgtagcgatcgccttcttcgcccatctcctcaagacgggactggaggcaggccaagtcgttttcggcaccctcctcaagggactgtgccacgcaaagcactcagatgaggctttggacgtggtgcttcacaggatgcctgagctaggctgcacccccgacgtggtggcctataccacggtcatccacggcttcttgaaggaaggccaagtaggcaaggcatgcaatctattccatggaatggcgcagcagggcgttgcgcctgatgtggtgacatatagctcagttattgatgcgctgtgcaaggccagagcaatggacaaggcagagtatttccttcgtgaaatggttgataatggtgtcgtacctaataatgtgacatataatagcctcatccatggatattcctctttgggccatcagaaggaggctgttagggtgctgaaagaaatgacaagacagggtatcatacctgatgtttttacttgcaactcggtcatggcctccctttgcaagaacggaaaaagcaaagaagctgcaaaaatgtttgattcaatgtccatgaagggcctgaaacctaacaccgtttcatatgttattctccttcatgggtatgccactgaaggatgcctagttgacatgatcaatctcttcaattccatggcaacagactgtattctacctaactgtcatatattcaacatactgatttatgcatatgctaaatctgggaagctcgacaaggctatgcttatatttaaagaaatgcagaaacaaggagtgagtccagatgcagtcacatattcaaccgtaatacatgcattttgcaaaaagggtaggttggatgatgctgtgataaagtttaatcagatgattgatacaggagtacgaccggacgcatctgtttatcgttccctaatccagggtgaaagcaaaggaatatgttac

SEQ ID NO: 1872 - DNA, 984 bp, Triticum aestivum; identical to SEQ ID NO: 1870
  source 1..984: mol_type = genomic DNA

SEQ ID NO: 1873 - DNA, 2376 bp, Triticum aestivum
  source 1..2376: mol_type = genomic DNA
atgcctcgcttctcctccagcacgccaatgtcgccaccacgcctccgcctcctcctcctcctccgacttggcgcccgccactcctcctccacctctcatccctcacgcatctgggatccccacgccgccttcgccgccgcgacgcagcgggctcgctctggcacgctcaccacggaggacgcacaccacctgttcgaagaattgctgcggcagggcaatcctgtccaggagcgtcccttgactaactttctggctgcccttgcccgcgcgcccgcgtccccattctgcagcgatggccccgccctggccgtcgccctcttcagccgtttgtcccgaggcgccggacgacgggtggcacagccaaatgttttcacctatggagtcctaatggactgctgctgccgtgcgcgccgcttggatctagcgatcgccttcttcgcccatctcctcaagacgggactggaggcaggccaagtcgttttcggcaccctcctcaagggactctgccacgcaaagcactcagatgaggctttggacgtggtgcttcacaggatgcctgagctaggctgcacccccgacgtggtggcctataccacggtcatccacggcttcttgaaggaaggccaagtaggcaaggcatgcaatctattccatggaatggcgcagcagggcgttgcgcctgatgtggtgacatatagctcagttattgatgcgctgtgcaaggccagagcaattgacaaggcagagtatttccttcgtgaaatggttgataatggtgtcgtacctaataatgtgacatataatagcctcatccatggatattcctctttgggccatcagaaggaggctgttagggtgctgaaagaaatgacaagacagggtatcatacctgatgtttttacttgcaactcggtcatggcctccctttgcaagaacggaaaaagcaaagaagctgcaaaaatgtttgattcaatgtccatgaagggcctgaaacctaacaccgtttcatatgttattctccttcatgggtatgccactgaaggatgcctagttgacatgatcaatctcttcaattccatggcaacagactgtattctacctaactgtcatatattcaacatactgatttatgcatatgctaaatctgggaagctcgacaaggctatgcttatatttaaagaaatgcagaaacaaggagtgagtccagatgcagtcacatattcaaccgtaatacatgcattttgcaaaaagggtaggttggatgatgctgtgataaagtttaatcagatgattgatacaggagtacgaccggacgcatctgtttatcgttccctaatccagggtttttgtacacatggcgatttggtgaaagcaaaggaatatgttactgaaatgatgaagaaaggtatgcttcctcctgatattatgttcttcagttcaatcatgcagaacctatgcacagaaggaagggtaatagaagcacgagatatccttgacttgatagtgtgcattggtatgaggcctgatgttttcatatttaatatactgatcggcggatactgcctagtccgcaagatggcagatgcatcaaaaatatttgatgatatggtgtcatatggtttagaaccttgtaatattacgtatggtatacttattaatggctattgcaaaaacggaaggattgatgacgggcttattctgttcaaggagatgctgcacaagggacttaaacctacaacttttaattataacgtcatactggatggattatttctggctagacaaactgttgctgcaaaggtgaagtttcatgagatggctgaatctggagtaagtgtgtgcattgatacatactctatagttcttggtggactttgtagaaataattgcatcggtgaagcaatcacgctatttcagaaattaagtacaatgaatgttaaattcaatattgcaattgtcaatatcatgattggtgcattcttcagggttcggcgaaaccaggaagctaaggatttgtttgctgcagtatcagccaatggtttggtagctaatgtctttacctacactgtaatgatgataaatcttatagaagaagggtcactggaagaagctgacactctctttttatcaatgaagaagagcggctgtactgccaactcttgtatgttaaatcatattatcagaaggttactggaaagaggagagatagtcaaggctggaaattatatgtcgaaagttgatgcaaagagctactcacttgaagctaaaactgttttgctgctgatctctctcttttcagggaatgggaaatatagagaacacataaaattgctccctatgaagtatcagtttctcgaagaagcagccacagttgaa

SEQ ID NO: 1874 - DNA, 1365 bp, Triticum aestivum
  source 1..1365: mol_type = genomic DNA
atgcctcgcttctcctccagcacgccaatgtygccaccacgcctccgcctcctcctcctcctccgacttggcgcccgccactcctcctccacctctcatccctcacgcatctgggatccccacgccgccttcgccgccgcgacgcagcgggctcgctctggcacgctcaccacggaggacgcacaccacctgttcgaagaattgctgcggcagggcaatcctgtccaggagcgtcccttgactaactttctggctgcccttgcccgcgcgcccgcgtccccattctgcagcgatggccccgccctggccgtcgccctcttcagccgtttgtcccgaggcgccggacgacgggtggcacagccaaatgttttcacctatggagtcctaatggactgctgctgccgtgcgcgccgcttggatctagcgatcgccttcttcgcccatctcctcaagacgggactggaggcaggccaagtcgttttcggcaccctcctcaagggactctgccacgcaaagcactcagatgaggctttggacgtggtgcttcacaggatgcctgagctaggctgcacccccgacgtggtggcctataccacggtcatccacggcttcttgaaggaaggccaagtaggcaaggcatgcaatctattccatggaatggcgcagcagggcgttgcgcctgatgtggtgacatatagctcagttattgatgcgctgtgcaaggccagagcaattgacaaggcagagtatttccttcgtgaaatggttgataatggtgtcgtacctaataatgtgacatataatagcctcatccatggatattcctctttgggccatcagaaggaggctgttagggtgctgaaagaaatgacaagacagggtatcatacctgatgtttttacttgcaactcggtcatggcctccctttgcaagaacggaaaaagcaaagaagctgcaaaaatgtttgattcaatgtccatgaagggcctgaaacctaacaccgtttcatatgttattctccttcatgggtatgccactgaaggatgcctagttgacatgatcaatctcttcaattccatggcaacagactgtattctacctaactgtcatatattcaacatactgatttatgcatatgctaaatctgggaagctcgacaaggctatgcttatatttaaagaaatgcagaaacaaggagtgagtccagatgcagtcacatattcaaccgtaatacatgcattttgcaaaaagggtaggttggatgatgctgtgataaagtttaatcagatgattgatacaggagtacgaccggacgcatctgtttatcgttccctaatccagggtgaaagcaaaggaatatgttac

SEQ ID NO: 1875 - DNA, 2376 bp, Triticum aestivum
  source 1..2376: mol_type = genomic DNA
atgcctcgcttctcctccagcacgccaatgtcgccaccacgcctccgcctcctcctcctcctccgacttggcgcccgccactcctcctccacctctcatccctcacgcatctgggatccccacgccgccttcgccgccgcgacgcagcgggctcgctctggcacgctcaccacggaggacgcacaccacctgttcgaagaattgctgcggcagggcaatcctgtccaggagcgtcccttgactaactttctggctgcccttgcccgcgcgcccgcgtccccattctgcagcgatggccccgccctggccgtcgccctcttcagccgtttgtcccgaggcgccggacgacgggtggcacagccaaatgtcttcacctatggagtcctaatggactgctgctgccgtgcgcgccgcttggatgtagcgatcgccttcttcgcccatctcctcaagacgggactggaggcaggccaagtcgttttcggcaccctcctcaagggactgtgccacgcaaagcactcagatgaggctttggacgtggtgcttcacaggatgcctgagctaggctgcacccccgacgtggtggcctataccacggtcatccacggcttcttgaaggaaggccaagtaggcaaggcatgcaatctattccatggaatggcgcagcagggcgttgcgcctgatgtggtgacatatagctcagttattgatgcgctgtgcaaggccagagcaatggacaaggcagagtatttccttcgtgaaatggttgataatggtgtcgtacctaataatgtgacatataatagcctcatccatggatattcctctttgggccatcagaaggaggctgttagggtgctgaaagaaatgacaagacagggtatcatacctgatgtttttacttgcaactcggtcatggcctccctttgcaagaacggaaaaagcaaagaagctgcaaaaatgtttgattcaatgtccatgaagggcctgaaacctaacaccgtttcatatgttattctccttcatgggtatgccactgaaggatgcctagttgacatgatcaatctcttcaattccatggcaacagactgtattctacctaactgtcatatattcaacatactgatttatgcatatgctaaatctgggaagctcgacaaggctatgcttatatttaaagaaatgcagaaacaaggagtgagtccagatgcagtcacatattcaaccgtaatacatgcattttgcaaaaagggtaggttggatgatgctgtgataaagtttaatcagatgattgatacaggagtacgaccggacgcatctgtttatcgttccctaatccagggtttttgtacacatggcgatttggtgaaagcaaaggaatatgttactgaaatgatgaagaaaggtatgcttcctcctgatattatgttcttcagttcaatcatgcagaacctatgcacagaaggaagggtaatagaagcacgagatatccttgacttgatagtgtgcattggtatgaggcctgatgttttcatatttaatatactgatcggcggatactgcctagtccgcaagatggcagatgcatcaaaaatatttgatgatatggtgtcatatggtttagaaccttgtaatattacgtatggtatacttattaatggctattgcaaaaacggaaggattgatgacgggcttattctgttcaaggagatgctgcacaagggacttaaacctacaacttttaattataacgtcatactggatggattatttctggctagacaaactgttgctgcaaaggtgaagtttcatgagatggctgaatctggagtaagtgtgtgcattgatacatactctatagttcttggtggactttgtagaaataattgcatcggtgaagcaatcacgctatttcagaaattaagtacaatgaatgttaaattcaatattgcaattgtcaatatcatgattggtgcattcttcagggttcggcgaaaccaggaagctaaggatttgtttgctgcagtatcagccaatggtttggtagctaatgtctttacctacactgtaatgatgataaatcttatagaagaagggtcactggaagaagctgacactctctttttatcaatgaagaagagcggctgtactgccaactcttgtatgttaaatcatattatcagaaggttactggaaagaggagagatagtcaaggctggaaattatatgtcgaaagttgatgcaaagagctactcacttgaagctaaaactgttttgctgctgatctctctcttttcagggaatgggaaatatagagaacacataaaattgctccctatgaagtatcagtttctcgaagaagcagccacagttgaa

SEQ ID NO: 1876 - DNA, 543 bp, Triticum aestivum
  source 1..543: mol_type = genomic DNA
atgccgaccggccggctgtcctccatcttcaccagcaatgcaacctcctccttcagggctccttcgccacagccacgagcccccctcgccgccttggctgccaccacagagcgcgtgtgtgccggaacgctaagaccggaggaggcgcaccacctgttcgacgaattgctgagccaagccgccgccgtcccggaacgcgggctgaacaactttcttgccgcactagcccgtgctccaccctcagctgcctgcagcgatggccccggccttgccatcaccctcttcaaccgcatgtcccgaggcgctggtgcacaggtggtgtcgcccacgctctgtacctattccattctcatggactgctgctgccgtgcaggccgcccggacttggtggttgccttctttggccgcctcctcagatcatctccttcaacaacctcctcaaggggctctgccaggtcaagcgtacaaatgaggctgtggacttgttgctccaccggacacctgaactggactgtgtgcctaatgtcttctcgtacagcatcg

SEQ ID NO: 1877 - DNA, 1095 bp, Triticum aestivum
  source 1..1095: mol_type = genomic DNA
atgccgaccggccggctgtcctccatcttcaccagcaatgcaacctcctccttcagggctccttcgccacagccacgagcccccctcgccgccttggctgccaccacagagcgcgtgtgtgccggaacgctaagaccggaggaggcgcaccacctgttcgacgaattgctgagccaagccgccgccgtcccggaacgggggctgaacaactttcttgccgcactagcccgtgctccaccctcagctgcctgcagcgatggccccggccttgccatcaccctcttcaaccgcatgtcccgaggcgctggtgcacaggtggtgtcgcccacgctctgtacctattccattctcatggactgctgctgccgtgcaggccgcccggacttggtggttgccttctttggccgcctcctcagattggggctgcacttgaatgtcatctccttcaacaacctcctcaaggggctctgccaggtcaagcgtacaaatgaggctgtggacttgttgctccaccggacacctgaactggactgtgtgcctaatgtcttctcgtacagcatcgtaatcaacggctgttttaaagaaggtgaagtagacaaagcgtgcaatctcttccatgagatgccccaactgggagttcaacctaatgtggtcatctacacctcaattatcgatgcactaagcaagtgcggagccatggacaaggcagaagtggtccttcagcaaatggttgatcaaggcattgaacccaacatcaggacatatactagcctgatacatggatattccgcttcgggtcagtggaaggcggcagctagagtattcaaggaaatggtaagtgctggtgttctaccaaatgctgtcactttgaactcatttatggattcactttgcaagcatagaaggacaaaggaaaagggcaacctggtgcatgtagctcccacttgcgcagggtccagggaagggtccgaccactttgggtctatagtacgcagcctttccctacatttctgtaagaggctgtttccaggacttgaacccatgacctcatggtcacaaggcagcagctttaccactgcgccaaggctcccctca

SEQ ID NO: 1878 - DNA, 816 bp, Triticum aestivum
  source 1..816: mol_type = genomic DNA
atggatattgagcttgttggcaaggtggaggaagcactgagagtacttgatgctatgaagtctgctggcctccaacctactgctgttacgtatgctatacttcttaatggctactgtaaaattggcaggatcgccgatggattgagtcttttcagggaaatgtcactcagcggggttaaacccacgacttttatgtacaacattatacttgatgggctgtttcgctccgggagagcagtttctgcaaaggaaaaattccgtacgatgagcgaaagtggcataccagtgggcattgtcacatacaacatagttcttcatggattttgtagaaacaattgcactgatgaagcaatagagctgttcaagaaactacgtggaatgaatgtgaagattgatgtcataacactcactaccatgatttctgcaatgtttaaaactaggagaattgaagaagccaaggatttgtttgctactatatcagccattgggttggtgccttctgttgtgacttacagtgtaatgatgacgaatttcataaaagaagggttgctggcagaggctgatgatatgtttttagcaatggagaaggctggctgtgctcctgactcgagactgctaaatcacgtggtcagagtgttgctggagaatggtgcagttgtaaaggctgcaacttatctcgctaaacttgatgcaaaacagctgtcacttgaagcttcgacggtttcgttaatactatctctcttctcaaggaaagggaaattaagggagcatgtaaaattgcttccggtaaagtaccagcctcctgagatgttggac

SEQ ID NO: 1879 - DNA, 543 bp, Triticum aestivum; identical to SEQ ID NO: 1876
  source 1..543: mol_type = genomic DNA

SEQ ID NO: 1880 - DNA, 1521 bp, Triticum aestivum
  source 1..1521: mol_type = genomic DNA
atgccgaccggccggctgtcctccatcttcaccagcaatgcaacctcctccttcagggctccttcgccacagccacgagcccccctcgccgccttggctgccaccacagagcgcgtgtgtgccggaacgctaagaccggaggaggcgcaccacctgttcgacgaattgctgagccaagccgccgccgtcccggaacgcgggctgaacaactttcttgccgcactagcccgtgctccaccctcagctgcctgcagcgatggccccggccttgccatcaccctcttcaaccgcatgtcccgaggcgctggtgcacaggtggtgtcgcccacgctctgtacctattccattctcatggactgctgctgccgtgcaggccgcccggacttggtggttgccttctttggccgcctcctcagattggggctgcgcttgaatgtcatctccttcaataacctcctcaaggggctctgccaggtcaagcgtacaaatgaggctgtggacttgttgctccaccggacacctgaactggactgtgtgcctaatgtcttctcgtacagcatcgtaatcaacggctgttttaaagaaggtgaagtagacaaagcgtgcaatctcttccatgagatgccccaactgggagttcaacctaatgtggtcatctacacctcaattatcgatgcactaagcaagtgcggagccatggacaaggcagaagtggtccttcagcaaatggttgatcaaggcattgaacccaacatcaggacatatactagcctgatacatggatattccgcttcgggtcagtggaaggcggcagctagagtattcaaggaaatggtaagtgttggtgttctaccaaatgctgtcactttgaactcatttatggattcactttgcaagcatagaaggacaaaggatgctagagatatttttgactccatggctgcaaagggccaaaaacctgacattttctcctactctattatgctaaatgggtatgctaaagaaggatacttcgaggatatgactgatctcttcaatttgatggtactgaatggtattgtacctaaccaccatattttcaacatactgatcaatgcatatgctaaacgtggactgatggatgaggctatgcacatgttcgaagtaatgaggcaacaaggagtaaacccaaatgtagttgactatgtagtagtaatggattcactttgcaaaatgggtaggatggatgctgctctggacaaatttactcagctggtcaatcaaggagtttcacctaacaaagctgtttaccaatgcctggttctgggttcttgctctcatggtcattttgtgaaagccaaggaattgatctctgaagcaattaatagaggtctgttttctaacagtgtgttcttctatcctgtaataaacgacctatgcaaagaaggaaaggtgaaggaggcacaggatatgtttgacttcattctaggtattggtcggcggcctgatgtgattatgtacaattcactgatggatggatat

SEQ ID NO: 1881 - DNA, 2328 bp, Triticum aestivum
  source 1..2328: mol_type = genomic DNA
atgccgaccggccggctgtcctccatcttcaccagcaatgcaacctcctccttcagggctccttcgccacagccacgagcccccctcgccgccttggctgccaccacagagcgcgtgtgtgccggaacgctaagaccggaggaggcgcaccacctgttcgacgaattgctgagccaagccgccgccgtcccggaacgcgggctgaacaactttcttgccgcactagcccgtgctccaccctcagctgcctgcagcgatggccccggccttgccatcaccctcttcaaccgcatgtcccgaggcgctggtgcacaggtggtgtcgcccacgctctgtacctattccattctcatggactgctgctgccgtgcaggccgcccggacttggtggttgccttctttggccgcctcctcagattggggctgcgcttgaatgtcatctccttcaacaacctcctcaaggggctctgccaggtcaagcgtacaaatgaggctgtggacttgttgctccaccggacacctgaactggactgtgtgcctaatgtcttctcgtacagcatcgtaatcaacggctgttttaaagaaggtgaagtagacaaagcgtgcaatctcttccatgagatgccccaactgggagttcaacctaatgtggtcatctacacctcaattatcgatgcactaagcaagtgcgtagccatggacaaggcagaagtggtccttcagcaaatggttgatcaaggcattgaacccaacatcaggacatatactagcctgatacatggatattccgcttcgggtcagtggaaggcggcagctagagtattcaaggaaatggtaagtgttggtgttctaccaaatgctgtcactttgaactcatttatggattcactttgcaagcatagaaggacaaaggatgctagagatatttttgactccatggctgcaaagggccaaaaacctgatattttctcctactctattatgctaaatgggtatgctaaagaaggatacttcgaggatatgactgatctcttcaatttgatggtactgaatggtattgtacctaaccaccatattttcaacatactgatcaatgcatatgctaaacgtggactgatggatgaggctatgcacatgttcgaagtaatgaggcaacaaggagtaaacccaaatgtagttgactatgtagtagtaatggattcactttgcaaaatgggtaggatggatgctgctctggacaaatttactcagatggtcaatcaaggagtttcacctaacaaagctgtctaccaatgcctggttctgggttcttgctctcatggtcattttgtgaaagccaaggaattgatctctgaagcaattaatagaggtctgttttctaacagtgtgttcttctatcctgtaataaacgacctatgcaaagaaggaaaggtgaaggaggcacaggatatgtttgacttcattctaggtattggtcggcggcctgatatgattatgtacaattcactgatggatggatattgccttgttggcaaggtggaggaagcactgagagtacttgatgctatgaagtctgctggcctccaacctactgctgttacgtatgctatacttcttaatggctactgtaaaattggcaggatcgccgatggattgagtcttttcagggaaatgtcactcagcggggttaaacccacgacttttatgtacaacattatacttgatgggctgtttcgctccgggagagcagtttctgcaaaggaaaaattccgtacgatgagcgaaagtggcataccagtgggcattgtcacatacaacatagttcttcatggattttgtagaaacaattgcactgatgaagcaatagagctgttcaagaaactacgtggaatgaatgtgaagattgatgtcataacactcactaccatgatttctgcaatgtttaaaactaggagaattgaagaagccaaggatttgtttgctactatatcagccattgggttggtgccttctgttgtgacttacagtgtaatgatgacgaatttcataaaagaagggttgctggcagaggctgatgatatgtttttagcaatggagaaggctggctgtgctcctgactcgagattgctaaatcatgtggtcagagtgttgctggagaatggtgcagttgtaaaggctgcaacttatctcgctaaacttgatgcaaaacagctgtcacttgaagcttcgacggtttcgttaatactatctctcttctcaaggaaagggaaattaagggagcatgtaaaattgcttccggtaaagtaccaacctcctgagatgttggac

SEQ ID NO: 1882 - DNA, 1521 bp, Triticum aestivum
  source 1..1521: mol_type = genomic DNA
atgccgaccggccggctgtcctccatcttcaccagcaatgcaacctcctccttcagggctccttcgccacagccacgagcccccctcgccgccttggctgccaccacagagcgcgtgtgtgccggaacgctaagaccggaggaggcgcaccacctgttcgacgaattgctgagccaagccgccgccgtcccggaacgcgggctgaacaactttcttgccgcactagcccgtgctccaccctcagctgcctgcagcgatggccccggccttgccatcaccctcttcaaccgcatgtcccgaggcgctggtgcacaggtggtgtcgcccacgctctgtacctattccattctcatggactgctgctgccgtgcaggccgcccggacttggtggttgccttctttggccgcctcctcagattggggctgcgcttgaatgtcatctccttcaacaacctcctcaaggggctctgccaggtcaagcgtacaaatgaggctgtggacttgttgctccaccggacacctgaactggactgtgtgcctaatgtcttctcgtacagcatcgtaatcaacggctgttttaaagaaggtgaagtagacaaagcgtgcaatctcttccatgagatgccccaactgggagttcaacctaatgtggtcatctacacctcaattatcgatgcactaagcaagtgcggagccatggacaaggcagaagtggtccttcagcaaatggttgatcaaggcattgaacccaacatcaggacatatactagcctgatacatggatattccgcttcgggtcagtggaaggcggcagctagagtattcaaggaaatggtaagtgttggtgttctaccaaatgctgtcactttgaactcatttatggattcactttgcaagcatagaaggacaaaggatgctagagatatttttgactccatggctgcaaagggccaaaaacctgacattttctcctactctattatgctaaatgggtatgctaaagaaggatacttcgaggatatgactgatctcttcaatttgatggtactgaatggtattgtacctaaccaccatattttcaacatactgatcaatgcatatgctaaacgtggactgatggatgaggctatgcacatgttcgaagtaatgaggcaacaaggagtaaacccaaatgtagttgactatgtagtagtaatggattcactttgcaaaatgggtaggatggatgctgctctggacaaatttactcagatggtcaatcaaggagtttcacctaacaaagctgtttaccaatgcctggttctgggttcttgctctcatggtcattttgtgaaagccaaggaattgatctctgaagcaattaatagaggtctgttttctaacagtgtgttcttctatcctgtaataaacgacctatgcaaagaaggaaaggtgaaggaggcacaggatatgtttgacttcattctaggtattggtcggcggcctgatgtgattatgtacaattcactgatggatggatat

SEQ ID NO: 1883 - DNA, 816 bp, Triticum aestivum
  source 1..816: mol_type = genomic DNA
atggatattgagcttgttggcaaggtggaggaagcactgagagtacttgatgctatgaagtctgctggcctccaacctactgctgttacgtatgctatacttcttaatggctactgtaaaattggcaggatcgccgatggattgagtcttttcagggaaatgtcactcagcggggttaaacccacgacttttatgtacaacattatacttgatgggctgtttcgctccgggagagcagtttctgcaaaggaaaaattccgtacgatgagcgaaagtggcataccagtgggcattgtcacatacaacatagttcttcatggattttgtagaaacaattgcactgatgaagcaatagagctgttcaagaaactacgtggaatgaatgtgaagattgatgtcataacactcactaccatgatttctgcaatgtttaaaactaggagaattgaagaagccaaggatttgtttgctactatatcagccattgggttggtgccttctgttgtgacttacagtgtaatgatgacgaatttcataaaagaagggttgctggcagaggctgatgatatgtttttagcaatggagaaggctggctgtgctcctgactcgagactgctaaatcacgtggtcagagtgttgctggagaatggtgcagttgtaaaggctgcaacttatctcgctaaacttgatgcaaaacagctgtcacttgaagcttcgacggtttcgttaatactatctctcttctcaaggaaagggaaattaagggagcatgtaaaattgcttccggtaaagtaccagcctcctaagatgttggac

SEQ ID NO: 1884 - DNA, 1521 bp, Triticum aestivum; identical to SEQ ID NO: 1880
  source 1..1521: mol_type = genomic DNA

SEQ ID NO: 1885 - DNA, 816 bp, Triticum aestivum
  source 1..816: mol_type = genomic DNA
atggatattgagcttgttggcaaggtggaggaagcactgagagtacttgatgctatgaagtctgctggcctccaacctactgctgttacgtatgctatacttcttaatggctactgtaaaattggcaggatcgccgatggattgagtcttttcagggaaatgtcactcagcggggttaaacccacgacttttatgtacaacattatacttgatgggctgtttcgctccgggagagcagtttctgcaaaggaaaaattccgtacgatgagcgaaagtggcataccagtgggcattgtcacatacaacatagttcttcatggattttgtagaaacaattgcactgatgaagcaatagagctgttcaagaaactacgtggaatgaatgtgaagattgatgtcataacactcactaccatgatttctgcaatgtttaaaactaggagaattgaagaagccaaggatttgtttgctactatatcagccattgggttgttgccttctgttgtgacttacagtgtaatgatgacgaatttcataaaagaagggttgctggcagaggctgatgatatgtttttagcaatggagaaggctggctgtgctcctgactcgagactgctaaatcacgtggtcagagtgttgctggagaatggtgcagttgtaaaggctgcaacttatctcgctaaacttgatgcaaaacagctgtcacttgaagcttcgacggtttcgttaatactatctctcttctcaaggaaagggaaattaagggagcatgtaaaattgcttccggtaaagtaccagcctcctgagatgttggac

SEQ ID NO: 1886 - DNA, 816 bp, Triticum aestivum; identical to SEQ ID NO: 1878
  source 1..816: mol_type = genomic DNA

SEQ ID NO: 1887 - DNA, 2313 bp, Triticum aestivum
  source 1..2313: mol_type = genomic DNA
atgccagccgcccgcctgtcctccatctccacctcctccttcagggctccttcacgagcccccctggccgccttggctgccgccacggagcgtgtgcgcgcgggaacgctgagccaggaggacgcgcaccacctgttcgacgaattgcttggccaagctgccgccgtcccggaacgcgggctcaacaactttcttgccgcactcgctcgtgctccaccctcagctgcctgccgcgatggcccgggccttgccatcgccctcttcaaccacatgtcccgaggcgctggtgcacgggtggtgtcgcccacactatgtacctattccatcctcatggactgctgctgccgcgcaggccgcccggacttggtggttgccttcttcggtcgcctcattaggttggggctgcgcttggaggtcatctccttcagcaatctcctcaaggggctctgccaggccaagcgtacaaatgaggcggtggacttgctgctccaccggacacctgaactggactgtgtgcctaatgtcttctcgtacaacatcgtaatcagcagctgttttaaagaaggtgaagtagacaaagcgtgcaatctcttccatgagatgccccaactgggagttcaacctaatgtggtcatctacacctcaattatcgatgcactaagcaagtgcggagccatggacaaggcagaagtggtccttcagcaaatggttgatcaaggcattgaacccgacatcaggacatatactagcctgatacatggatattctgcttcgggtcagtggaaggcggcagttagagtattcaaggaaatggtaagtgttggtgttctaccaaatgctgtcactttgaactcatttatggattcactttgcaagcatagaaggacaaaggaagctagagaaatttttgactctatggctgcaaagggcctgaaacctaatatcgtctcctactctactatgcttaatgggtatgtcaaagaaggatccttcgaggatatgactgatctcttcaattcgatggtacggaatggtattgtacctaaccaccatattttcaacatactgatcaatgcatatgctaaacgtggactgatggatgaggctatgcacatgttcgaagtaatgaggcaacaaggagtaaacccggatgtatttgactatcaaatcataatggattcactttgcaaaatgggtaggatggatgctgctctggacaaatttaatcagatggtcaatcaaggagtttcacctaacaaagctgtttaccaatgcctggttctgggttcttgctctcatggtgattttgtgaaagccaaggaattgatttctgaagcagttaatagaggtctgtgttctaacagtgtgttcttctatcctgtaataaacgacctttgcaaagaaggaaaggtaaaggaggcccaggatatgtttgacttcatcctaggtattggtcagcggcctgatgtgattatgtacacttcactgatggatggatattgccttgttggcaaggtggagaaagcactgagtgtactcgatgctatgaaatctgctggcctccaacctgatgatgttgtatatgctacacttcttaacggttactgtaaaattggaaggattgccgatggattgagccttttcagggaaatgtcactcagcggggttaagcccacgactattatatacaacattatactggatgggctgttttgctctgggagaacaggttctgcaaaggaaaaattccatacgatgactgaaagtggcataccagtaggcgttgacacatacaacatagttcttagtggactttgtagaaacaattgcactgatgaagcaatagaactgttcaagaaactacgtgcaacgaacgtgaagattgatatcatgacactcaatatcatgatttctgcaatgtttaaaactaggagaattgaagaagccaaggatttgtttgctactatatcagccatcggattggtgccttctgttgtgacttacagtttaatgatgacgaatttcataaaagaagggttgttggcagatgctgatgatacctttttggtaatggagaaagctggctgtgctcccaactccagtctgctaaatcaggtggtcagggtgttgctggaaaaaggtgcatttgtaaaggctgcaacttatctcgctaaacttgatgctaaacagctgtcagttgaagcttcaacgatttcgttaatagtatctctcttctcaggggaagggaaaccaagggagcatgtagagttgcttccagtaaagtaccagcctcctcagagttcggctgacaat

SEQ ID NO: 1888 - DNA, 2313 bp, Triticum aestivum
  source 1..2313: mol_type = genomic DNA
atgccggccgcccgcctgtcctccatccccacctcctccttcagggcttcttcacgagcccccctcgccgccttggctgtcgccacggaacgcgttcgcgctggaacgctaagccgggaggacgcgcaccacctgttcgacgaattgcttggccaagccgccgctgtcccggaacgcgggctcaacaactttcttgccgcactcgcccgtgctccaccctcagctgcctgccgcgatggccccggccttgccatcgccctcttcaaccgcatgtcccgaggcactggtgcacgggtggtgtcgcccacgctctgtacctattccatcctcatggactgctgctgccgtgcaggccgcccggacttggtggttgccttcttcggccgcctcctcaggttggggctgcgcttggacgtcatctccttaagcaatctcctcaaggggctttgccaggctaagcgctcaaatgaggcattggatctgctgctccaccggatgcccgaactacactgtgcgcctggtgtcttctcgtacaacatagtaatcaacggctgcttgaaagaaggtgaagtagacaaagcgtgcaatctcttccatgagatgccccaactgggagttcaacctgatgtggtgacctacacctcaatcatggacgcactaagcaagtctggagcaatggacaaggcagaagtgctccttcggcaaatggttgatcaaggaattgaacccaatattaggacatatagctgtctgatccatggatattctacttttggtcagtggaaggaggcacttagggtattcaaagaaatggcaactcttggtgttgtaccagacgttgtcacgttgagctcattaatcgattccctttgcaagcacagaaggacaaaggaagctagagaaatttttgactctatggctgcaaagggcctgaaacctaatatcgtctcctactctactatgcttaatgggtatgtcaaagaaggatccttcgaggatatgactgatctcttcaattcaatggtacggaatggtattgtacctgaccaccatattttcaacatacagatcaatgcatatgctaaacgtggactgatggatgaggctatgcacatgttcgaagtaatgaggcaacaaggagtaaacccggatgtatttgactatcaaatcataatggattcactttgtaaaatgggtaggatggatgctgctctggacaaatttaatcagatggtcaatcaaggagtttcacctaacaaagctgtttaccaatgcctggttctgggttcttgctctcatggtgattttgtgaaagccaaggaattgatttctgaagcggttaatagaggtctgtgttctaacagtgtgttcttctatcctgtaataaacgacctttgcaaagaaggaaaggtaaaggaggcacaggatatgtttgacttcatcctaggtattggtcagcggcctgatgtgattatgtacacttcactgatggatggatattgccttgttggcaaggtggagaaagcactgagtgtactcgatgctatgaaatttgctggccttcaacctgatgatgttgtatatggtacacttcttaacagttactgtaaaattggaaggattgccgatggattgagccttttcagggaaatgtcactcagcggggttaagcccacgactattatatacaacattatactggatgggctgttttgctctgggagaacaggttctgcaaaggaaaaattccatacgatgactgaaagtggcataccagtaggcgttgacacatacaacatagttcttagtggactttgtagaaacaattgcactgatgaagcaatagaactgttcaagaaactacgtgcaacgaacgtgaagattgatgtcatgacactcaatatcatgatttctgcaatgtttaaaactaggagaattgaagaagccaaggatttgtttgctactatatcagccattggattggtgccttctgttgtgacttacagtttaatgatgacgaatttcataaaagaagggttgttggcagacgctgatgatacctttttggtaatggagaaagctggctgtgctcccaactccagtctgctaaatcaggtggtcagggtgttgctggaaaaaggtgcagttttaaaggctgcaacttatctcgctaaacttgatgctaaacagctgtcagttgaagtttcaacgatttcgttaatagtatctctcttctcaggggaagggaaactaagggagcatgtagagttgcttccagtaaagtaccagcctcctcagagttcggctgacaat

SEQ ID NO: 1889 - DNA, 2043 bp, Triticum aestivum
  source 1..2043: mol_type = genomic DNA
atgtcccgaggcgctggtgcacgggtggtgtcgcccacgctctgtacctattccatcctcatggactgctgctgccgtgcaggccgcccggacttggtgcttgccttcttcggccgcctcctcaggttggggctgcgcttggacgtcatctccttaagcaatctcctcaaggggctttgccaggctaagcgctcaaatgaggcattggatctgctgctccaccggatgcccgaactacactgtgcgcctgatgtcttctcgtacaacatagtaatcaacggctgcttgaaagaaggtgaagtagacaaagcgtgcaatctcttccatgagatgccccaactgggagttcaacctgatgtggtgacctacacctcaatcatggacgcactaagcaagtccggagcaatggacaaggcagaagtgctccttcggcaaatggttgatcaaggaattgaacccaatatcaggacatatagctgtctgatccatggatattctacttttggtcagtggaaggaggcacttagggtattcaaagaaatggcaagtcttggtgttgtaccagacgttgtcacgttgagctcattaatcgattccctttgcaggcacagaaggacaaagcaagctagagaaatttttgactctatggctgcaaagggcctgaaacctaatatcgtctcctactctactatgcttaaagggtatgtcaaagaaggatccttcgaggatatgactgatctcttcaattcgatggtacggaatggtattgtacctgaccaccatattttcaacatacagatcaatgcatatgctaaacgtggactgatggatgaggctatgcacatgttcgaagtaatgaggcaacaaggagtaaacccggatgtatttgactatcaaatcataatggattcactttgtaaaatgggtaggatggatgctgctctggacaaatttaatcagatggtcaatcaaggagtttcacctaacaaagctgtttaccaatgcctggttctgggttcttgctctcatggtgattttgtgaaagccaaggaattgatttctgaagcggttaatagaggtctgtgttctaacagtgtgttcttctatcctgtaataaacgacctttgcaaagaaggaaaggtaaaggaggcacaggatatgtttgacttcatcctaggtattggtcagcggcctgatgtgattatgtacacttcactgatggatggatattgccttgttggcaaggtggagaaagcactgagtgtactcgatgctatgaaatttgctggccttcaacctgatgatgttgtatatggtacacttcttaacggttactgtaaaattggaaggattgccgatggattgagccttttcagggaaatgtcactcagcggggttaagcccacgactattatatacaacattatactggatgggctgttttgctctgggagaacaggttctgcaaaggaaaaattccatacgatgactgaaagtggcataccagtaggcgttgacacatacaacatagttcttagtggactttgtagaaacaattgcactgatgaagcaatagaactgttcaagaaactatgtgcaacgaacgtgaagattgatgtcatgacactcaatatcatgatttctgcaatgtttaaaactaggagaattgaagaagccaaggatttgtttgctactatatcagccatcggattggtgccttctgttgtgacttacagtttaatgatgacgaatttcataaaagaagggttgttggcagacgctgatgatacctttttggtaatggagaaagctggctgtgctcccaactccagtctgctaaatcaggtggtcagggtgttgctggaaaaaggtgcagttttaaaggctgcaacttatctcgctaaacttgatgctaaacagctgtcagttgaagtttcaacgatttcgttaatagtatctctcttctcaggggaagggaaactaagggagcatgtagagttgcttccagtaaagtaccagcctcctcagagttcggctgacaat

SEQ ID NO: 1890 - DNA, 2043 bp, Triticum aestivum; identical to SEQ ID NO: 1889
  source 1..2043: mol_type = genomic DNA

SEQ ID NO: 1891 - DNA, 2313 bp, Triticum aestivum; identical to SEQ ID NO: 1888
  source 1..2313: mol_type = genomic DNA

SEQ ID NO: 1892 - DNA, 1557 bp, Triticum aestivum
  misc_feature 1048: note = n is a, c, g, or t
  misc_feature 1549: note = n is a, c, g, or t
  source 1..1557: mol_type = genomic DNA
atgccccaactgggagttcaacctgatgtggtgacctacacctcaatcatggacgcactaagcaagtccggagcaatggacaaggcagaagtgctccttcggcaaatggttgatcaaggaattgaacccaatatcaggacatatagctgtctgatccatggatattctacttttggtcagtggaaggaggcacttagggtattcaaagaaatggcaagtcttggtgttgtaccagacgttgtcacgttgagctcattaatcgattccctttgcaggcacagaaggacaaagcaagctagagaaatttttgactctatggctgcaaagggcctgaaacctaatatcgtctcctactctactatgcttaaagggtatgtcaaagaaggatccttcgaggatatgactgatctcttcaattcgatggtacggaatggtattgtacctgaccaccatattttcaacatacagatcaatgcatatgctaaacgtggactgatggatgaggctatgcacatgttcgaagtaatgaggcaacaaggagtaaacccagatgtatttggctatcaaatcataatggattcactttgtaaaatgggtaagatggatgctgctctggacaaatttaatcagatggtcaatcaaggagtttcacctaacaaagctgtttaccaatgcctggttctgggttcttgctctcatggtgattttgtgaaagccaaggaattgatttctgaagcggttaatagaggtatgtgttctaacagtgtgttcttctatcctgtaataaacgacctttgcaaagaaggaaaggtaaaggaggcacaggatatgtttgacttcatcctaggtattggtcagcggcctgatgtgattatgtacacttcactgatggatggatattgccttgttggcaaggtggagaaagcactgagtgtactcgatgctatgaaatttgctggccttcaacctgatgatgttgtatatggtacacttcttaacagttactgtaaaattggaaggattgccgatggattgagccttttcaggnaaatgtcactcagcggggttaagcccacgactattatatacaacattatactggatgggctgttttgctctgggagaacaggttctgcaaaggaaaaattccatacratgactgaaagtggcataccagtaggcgttgacacatacaacatagttcttagtggactttgtagaaacaattgcactgatgaagcaatagaactgttcaagaaactacgtgcaacgaacgtgaagattgatgtcatgacactcaatatcatgatttctgcaatgtttaaaactaggagaattgaagaagccaaggatttgtttgctactatatcagccatcggattggtgccttctgttgtgacttacagtttaatgatgacgaatttcataaaagaagggttgttggcagacgctgatgatacctttttggtaatggagaaagctggctgtgctcccaactccagtctgctaaatcargtggtcagggygttgctggaaaaaggtgcagttntaaatgaa

SEQ ID NO: 1893 - DNA, 2043 bp, Triticum aestivum; identical to SEQ ID NO: 1889
  source 1..2043: mol_type = genomic DNA

SEQ ID NO: 1894 - DNA, 2313 bp, Triticum aestivum
  source 1..2313: mol_type = genomic DNA
atgccggccgcccgcctgtcctccatccccacctcctccttcagggcttcttcacgagcccccctagccgccttggctgtcgccacggaacgcgttcgcgctggaacgctaagccgggaggacgcgcaccacctgttcgacgaattgcttggccaagccgccgctgtcccggaacgcgggctcaacaactttcttgccgcactcgcccgtgctccaccctcagctgcctgccgcgatggccccggccttgccatcgccctcttcaaccgcatgtcccgaggcactggtgcacgggtggtgtcgcccacgctctgtacctattccatcctcatggactgctgctgccgtgcaggccgcccggacttggtgcttgccttcttcggccgcctcctcaggttggggctgcgcttggacgtcatctccttaagcaatctcctcaaggggctttgccaggctaagcgctcaaatgaggcattggatctgctgctccaccggatgcccgaactacactgtgcgcctggtgtcttctcgtacaacatagtaatcaacggctgcttgaaagaaggtgaagtagacaaagcgtgcaatctcttccatgagatgccccaactgggagttcaacctgatgtggtgacctacacctcaatcatggacgcactaagcaagtccggagcaatggacaaggcagaagtgctccttcggcaaatggttgatcaaggaattgaacccaatatcaggacatatagctgtctgatccatggatattctacttttggtcagtggaaggaggcacttagggtattcaaagaaatggcaactcttggtgttgtaccagacgttgtcacattgagctcattaatcgattccctttgcaagcacagaaggacaaaggaagctagagaaatttttgactctatggctgcaaagggcctgaaacctaatatcgtctcctactctactatgcttaatgggtatgtcaaagaaggatccttcgaggatatgactgatctcttcaattcgatggtacggaatggtattgtacctgaccaccatattttcaacatacagatcaatgcatatgctaaacgtggactgatggatgaggctatgcacatgttcgaagtaatgaggcaacaaggagtaaacccggatgtatttgactatcaaatcataatggattcactttgtaaaatgggtaggatggatgctgctctggacaaatttaatcagatggtcaatcaaggagtttcacctaacaaagctgtttaccaatgcctggttctgggttcttgctctcatggtgattttgtgaaagccaaggaattgatttctgaagcggttaatagaggtctgtgttctaacagtgtgttcttctatcctgtaataaacgacctttgcaaagaaggaaaggtaaaggaggcacaggatatgtttgacttcatcctaggtattggtcagcggcctgatgtgattatgtacacttcactgatggatggatattgccttgttggcaaggtggagaaagcactgagtgtactcgatgctatgaaatttgctggccttcaacctgatgatgttgtatatggtacacttcttaacagttactgtaaaattggaaggattgccgatggattgagccttttcagggaaatgtcactcagcggggttaagcccacgactattatatacaacattatactggatgggctgttttgctctgggagaacaggttctgcaaaggaaaaattccatacaatgactgaaagtggcataccagtaggcgttgacacatacaacatagttcttagtggactttgtagaaacaattgcactgatgaagcaatagaactgttcaagaaactacgtgcaacgaacgtgaagattgatgtcatgacactcaatatcatgatttctgcaatgtttaaaactaggagaattgaagaagccaaggatttgtttgctactatatcagccatcggattggtgccttctgttgtgacttacagtttaatgatgacgaatttcataaaagaagggttgttggcagacgctgatgatacctttttggtaatggagaaagctggctgtgctcccaactccagtctgctaaatcaggtggtcagggtgttgctggaaaaaggtgcagttttaaaggctgcaacttatctcgctaaacttgatgctaaacagctgtcagttgaagtttcaacgatttcgttaatagtatctctcttctcaggggaagggaaactaagggagcatgtagagttgcttccagtaaagtaccagcctcctcagagttcggctgacaat

SEQ ID NO: 1895 - DNA, 2361 bp, Triticum aestivum
  source 1..2361: mol_type = genomic DNA
atgcctcgcttctcctccagcacgccaatgtcgccaccccgcctccgcctccgactctgcgcccgccactcctcctccacctctcatccctcacgcatctgggatccccacgccgccttcgccgccgcgacgcagcgggcgcactctggcaacctcaccccggaggacgcacaccatctgttcgacgaattgctgcggcagggcaatcctgtccaggagcgtcccttgaataactttctggctaccctcgcccgcgcgcccgcgtctgcatcctgcagtgatggccccgccctggccgttgccctctttggccgtttgtccggaggcgccggacgacgggtggcgcagccaaatgtgttcacctatggcgtcctcatggactgctgctgccgcgcgtgccgcacggatctggcgctcgctttcttcggccgtctcttcaggacgggcctggaggcaaaccaagtcatcttctgcaccctcctcaagggactctgccacgcaaagcgcacagatgaggctctggacgtgctgcttcacaggatgcctgagctgggctgcactccctatgtggtggcatataacaccgtcatccatggcttctttagggaaggccaagtaggcaaggcgtgcgatctgttccatggaatggcgcagcagggcgttatgcctgatgtggtgacatataactcagttatcgatgcgttgtgcaaggccagagcaatggacaaggcagagtatttccttcgtcagatggttgataatggtgtcgtacctaatactgtcacatataatagcctcatccatggatattcctcttcaggccattggaaggaggcggtcagggtattcaaagagatggcaagtcagagggttacagcagatgtgcatacttacaacatgtttatgacttttctttgcaaacatggaagaagcaaagaagctgcaggaatttttgataccatggctatcaagggcctgaaacctgataacgtttcatatgctattcgccttcatgggtatgccaccgaaggatgcttagttgatatgattaatctcttcaattcaatggaaagagattgtattctacctgactgtcgtatcttcaacatactgattaatgcatatgctaaatctgggaagcttgataaggctatgcttatcttcaatgaaatgcagaaacaaggagtgagtccaaatgcagtcacatattcaactgtaatagatgcattttgcaaaaagggtcagttggacgatgctatgataaagtttaatcagatgattgatacaggagtaccacagggcacagctgtttatggttctctaatccagggtttttgtacacacggcaatttggtgaaagcaaaggaattgcttactgaaatgatgaacaaaggtatacctcctcctgatattaagttcttccattcaatcatgcagaacctttgcacagaaggaagggtaatagaagcacatgatgtccttggcttgatagcgcacataggtatgaggcctaatgtttgcacatttaatatactgagcggtggatattgcctagtcggcaagatggaggatgcctcaaagatatttgatgatatgatgtcatatggcttagaaccttctaatatgacgtatggtatacttattaatggctattgcaaaaacgaaaggattaacgatgggttgattctgttcaaagaaatgttgcgcaagggacttaaacctacaacttttaattacaacgtcatactggatggattatttctaactggacgaactgttgctgcaaaggaaaagtttgatgagatggttgaatctggagtaagtgtgtgcattgatacatattcgatagttcttggtggactttgtagaaataattgtagcggcgaagcaatcatgctattccagaaattaagcacaatggatgtgaaattcaatattacaattgtcaatataatgattgatgccttctacagggttcagcgaaaccaagaagccaaggatttgtttgctgcagtatcagccaatggtttggtagctgatgtctttacctacaccataatgatgaaaaatcttataaaagaagggtcagtggaagaagctgacgatctctttttatcaatggagaagagcggctgtactgctgactcttatatgttaaatcttatcgtcagaatgttactggaaaaaggagagctagtcaaggctgggaattatatgtctaaagttgatgcaatgagctactcacttgaagctgaaaccgtttcgctgcttatctctctcttttcagggaaagggaaatatagagaacacataggattgctccctacaaagtatcggtttcatgaagaagcagccacagtt

SEQ ID NO: 1896 - DNA, 2361 bp, Triticum aestivum
  source 1..2361: mol_type = genomic DNA
atgcctcgcttctcctccagcacgccaatgtcgccaccccgcctccgcctccgactctgcgcccgccactcctcctccacctctcatccctcacgcatctgggatccccacgccgccttcgccgccgcgacgcagcgggcgcgctctggcaacctcaccccggaggacgcacaccatctgttcgacgaattgctgcggcagggcaatcgtgtccaggaacgtcccttgaataactttctggctaccctcgcccgcgcgcccgcgtctgcatcctgcagtgatggccccgccctggccgttgccctctttggccgtttgtccggaggcgccggacgacgggtggcgcagccaaatgtgttcacctatggcgtcctcatggactgctgctgctgcgcgtgccgcacggatctggcgctcgccttcttcggccgtctcctcaagacgggcctggaggcagaccaagtcgtcttctgcaccctcctcaagggcctttgccacgcaaagcgggcagatgaggctctggacgtgctgcttcacaggatgcctgagctgggctgcactccctatgtggtggcgtataacaccgtcatccatggcttctttagggaaggccaagtaggcaaggcgtgcaatctattccatgaaatgaggcagcagggcgttacacctgatgttgtgacatataacacagttattgatgcgttgtgcaaggccaaagcaatggacaaggcagagtatttccttggtcagatggttgatgatggtgtcgtacctgataatgtgacatataatagccttatccatggatattcctcttcaggccattcaaaggaggcggtcagggtgctgaaagagatgacaagtaagggtatcataccagatgtttttacttgcaactcgctcatggcctccctttgcaagaatggaagaagcaaagaagctgcagaaatatttgattcaatgtccatgaagggcctgaaacctaacaccgtttcatatgctattctccttcatgggtatgccattgaaggatgcttggttgacatgatcaatctcttcaattcaatggcaacagactgtattctacctaactgtcatatcttcagcatactgattaatgcatatgctaaatctgggaagcttgataaggctatgcttatcttccatgaaatgcagaaacaaggagtgagtccaaatgcagtcacatattcaactgtaatagatgcattttgcaaaaagggtcagttggacgatgctatgataaagtttaatcagatgattgatacaggagtacgacagggcacagctgtttatggttctctaatccagggtttttgtacacacggcgatttggtgaaagcaaaggaattgcttactgaaatgatgaacaaaggtatacctcctcctgatattaagttcttccattcaatcatgcagaaccttggcacagaaggaagggtaatagaagcacgggatgtccttggcttgatagcgcacataggtatgaggcctaatgtttgcacatttaatatactgatcggtggatattgcctagtcggcaagatggaggatgcctcaaaaatatttgatgatatgatgtcatatggcttagaaccttctaatattacgtatggtatacttattaatggctattgcaaaaacgaaaggattaacgatgggttgattctgttcaaagaaatgttgcgcaagggacttaaacctacaacttttaattacaacgtcatactggatggattatttctgactggacgaactgttgctgcaaaggaaaagtttgatgagatggttgaatctggagtaagtgtgtgcattgatacatattcgatagttcttggtggactttgtaaaaataattgtagcggcgaagcaatcacgctattccagaaattaagcacaatggatgtgaaattcaatattacaattgtcaatataatgattgatgccttctacagggttcagcgaaaccaagaagccaaggatttgtttgctgcagtatcagccaatggtttggtagctaatgtctttacctacaccataatgatgaaaaatcttataaaagaagggtcagtggaagaagctgacgatctctttttatcaatggagaagagcggctgtactgctgactcttatatgttaaatcttatcgtcagaatgttactggaaaaaggagagctagtcaaggctgggaattatatgtctaaagttgatgcaatgagctactcacttgaagctgaaaccgtttcgctgcttatctctctcttttcagggaaagggaaatatagagaacacataggattgctccctacaaagtatcggtttcatgaagaagcagccacagtt

SEQ ID NO: 1897 - DNA, 2337 bp, Triticum aestivum
  source 1..2337: mol_type = genomic DNA
atgtcgccaccccgtctccgcctccgactctgcgctcgccactcctcctccacctctcatccctcacgcatctgggatccccacgccgccttcgccgccgccacggaacgtgcgcactctggcaacctcacccccgaggacgcacaccacctgtttgacgaattgctgcggcaggccaatcctgtccaggagcgccccctcaacaaccttcttgccgccctcgcccgtgctccggcgtccgcggcgtgcagcgatggccctgcactcacagtcaatctcttcagccgcatatcccaaggcgcccgccgacgtgtggcgcacccaacggcctgcacctatggcatcctcatggactgctgctgccgcgcacaccgcctcgatctggcgttcgctttcttcggctgtctcctcaggacgggacttaaggcaggcgtcattcaagtttgcactcttctcaagggcctttgccgcgcaaagcgggctgatgaggctctggacatgctgcttcacaggatgcctgagctgggctgcacccccaacgtggtggcatataccacggtcatccacggcttctttaaggaaggccaagtaggcaaggcatgcaatctgttccatggaatggcgcagcagggcgttatgcctgatgtggtgacatataactcagttatcgatgcgctgtgcaaggccagagcaatggacaaggcagagtatttccttcgtcagatggttgataatggtgtcgtacctaataatgtcacatataatagcctcatccatggatattcctcttcaggccattggaaggaggcggtcagggtattcaaagagatgacaagtcggagggttacagcagatgtgcatacttacaacatgtttatgacctttctttgcaaacatggaagaagcaaagaagctgcaggtatttttgataccatggctatgaagggcctgaaacctgacaacgtttcatatgctattcgccttcatgggtatgccaccgaaggatgcttagttgatatgattaatctcttcaattcaatggaaagagactgtattctacctgactgttatatcttcaacatactgattaatgcatatgctaaatctgggaagcttgataaggctatgcttatcttcaatgaaatgcagaaacaaggagtgagtccaaatgcagtcacatattcaactgtaatagatgcattttgcaaaaagggtcagttggacgatgctatgataaagtttaatcagatgattgatacaggagtacgacagggcacagctgtttatcgttccctaatccagggattttgtacacacagcgatttggtgaaagcaaaggaattgcttactgaaatgatgaacaaaggtatacctcctcctgatattaagttcttccattcaatcatgcagaacctatgcacagaaggaagggtaatagaagcacgggatatccttggcttgatagcacacataggtatgaggcctaatgtttgcacatttaatatactgattggtggatactgcctagtcggcaagatggaggatgcctcaaaaatatttgatgatatgatgtcatatggtttagaaccttgtaacattacgtatggtatacttattaatggctattgcaaaaatagaaggattgatgacgggcttattctgttcaaagagatgctgcacaagggacttaaacctacaacctttaattataacgtcatactggatggattatttctggttggacgaactgttgctgcaaaggaaaagtttgacgagatggttgaatctggagtatgtgtgtgcattgatacatattcgatagttcttggtggactttgtagaaataattgtagcggcgaagcaatcacgctattccagaaattaagcacaatggaagtgaaattcaatattacaattgtcaatataatgattgatgctttctacaaggttcagcgaaaccaagaagccaaggatttgtttgctgcagtatcagccaatggtttggtagctgatgtctttacctacaccagaatgatgaaaaatcttataaaagaagggtcagtggaagaagctgacgatctctttttatcaatggagaagagcggctgtactgctgactcttatatgttaaatcttatcgtcagaatgtttctgggaaaaggagagatagtcaaggctgggaattatatatctaaaattgatgcaaagagctactcacttgaagctaaaactgtttcgctgcttatctctctcttttcagggaaagggaaatatagagaacacataggattgctccctgcaaagtatcggtttcgtgaagaagcagccacagttgtg

SEQ ID NO: 1898 - DNA, 2337 bp, Triticum aestivum
  source 1..2337: mol_type = genomic DNA
atgtcgccaccccgcctccgcctccgactctgcgcccgccactcctcctccacctctcatccctcacgcatctgggatccccacgccgccttcgccgccgccacggaacgtgcgcactctggcaacctcacccccgaggacgcacaccacctgtttgacgaattgctgcggcaggccaatcctgtccaggagcgccccctcaacaaccttcttgccgccctcgcccgtgctccggcgtccgcggcgtgcagcgatggccctgcactcacagtcaatctcttcagccgcatatcccaaggcgcccgccgacgtgtggcgcacccaacggcctgcacctatggcatcctcatggactgctgctgccgtgcacaccgcctcgatctggcgttcgctttcttcggctgtctcctcaggacgggacttaaggcaggcgtcattcaagtttgcactcttctcaagggcctttgccgcgcaaagcgggctgatgaggctctggacatgctgcttcacaggatgcctgagctgggctgcacccccaacgtggtggcatataccacggtcatccacggcttctttaaggaaggccaagtaggcaaggcatgcaatctgttccatggaatggcgcagcagggcgttatgcctgatgtggtgacatataactcagttatcgatgcgctgtgcaaggccagagcaatggacaaggcagagtatttccttcgtcagatggttgataatggtgtcgtacctaataatgtcacatataatagcctcatccatggatattcctcttcaggccattggaaggaggcggtcagggtattcaaagagatgacaagtcggagggttacagcagatgtgcatacttacaacatgtttatgacctttctttgcaaacatggaagaagcaaagaagctgcaggaatttttgataccatggctatgaagggcctgaaacctgacagcgtttcatatgctattcgccttcatggatatgccaccgaaggatgcttagttgatatgattaatctcttcaattcaatggaaagagattgtattctacctgactgtcgtatcttcaacatactgattaatgcatatgctaaatctgggaagcttgataaggctatgcttatcttcaatgaaatgcagaaacaaggagtgagtccaaatgcagtcacatattcaactgtaatagatgcattttgcaaaaagggtcagttggacgatgctatgataaagtttaatcagatgattgatacaggagtacgacagggcacagctgtttatcgttccctaatccagggattttgtacacacagcgatttggtgaaagcaaaggaattgcttactgaaatgatgaacaaaggtatacctcctcctgatattaagttcttccattcaatcatgcagaacctatgcacagaaggaagggtaatagaagcacgggatatccttggcttgatagcacacataggtatgaggcctaatgtttgcacatttaatatactgattggtggatactgcctagtcggcaagatggaggatgcctcaaaaatatttgatgatatgatgtcatatggtttagaaccttgtaacattacgtatggtatacttattaatggctattgcaaaaatagaaggattgatgacgggcttattctgttcaaagagatgctgcacaagggacttaaacctacaacctttaattataacgtcatactggatggattatttctggctggacgaactgttgctgcaaaggaaaagtttgacgagatggttgaatctggagtaagtgtgtgcattgatacatattcgatagttcttggtggactttgtagaaataattgtagcggcgaagcaatcacgctattccagaaattaagcacaatggaagtgaaattcaatattacaattgtcaatataatgattgatgctttctacaaggttcagcgaaaccaagaagccaaggatttgtttgctgcagtatcagccaatggtttggtagctgatgtctttacctacaccagaatgatgaaaaatcttataaaagaagggtcagtggaagaagctgacgatctctttttatcaatggagaagagcggctgtactgctgactcttatatgttaaatcttatcgttagaatgtttctgggaaaaggagagatagtcaaggctgggaattatatatctaaaattgatgcaaagagctactcacttgaagctaaaactgtttcgctgcttatctctctcttttcagggaaagggaaatatagagaacacataggattgctccctgcaaagtatcggtttcgtgaagaagcagccacagttgtg

SEQ ID NO: 1899 - DNA, 2337 bp, Triticum aestivum
  source 1..2337: mol_type = genomic DNA
atgtcgccaccccgcctccgcctccgactctgcgcccgccactcctcctccacctctcatccctcacgcatctgggatccccacgccgccttcgccgccgccacggaacgtgcgcgctctggcaacctcacccccgaggacgcacaccacctgtttgacgaattgctgcggcaggccaatcctgtccaggagcgccccctcaacaaccttcttgccgccctcgcccgtgctccggcgtccgcggcgtgcagcgatggccctgcactcacagtcaatctcttcagccgcatatcccaaggcgcccgccgacgtgtggcgcacccaacggcctgcacctatggcatcctcatggactgctgctgccgcgcacaccgcctcgatctggcgttcgctttcttcggctgtctcctcaggacgggacttaaggcaggcgtcattcaagtttgcactcttctcaagggcctttgccgcgcaaagcgggctgatgaggctctggacatgctgcttcacaggatgcctgagctgggctgcacccccaacgtggtggcatataccacggtcatccacggcttctttaaggaaggccaagtaggcaaggcatgcaatctgttccatggaatggcgcagcagggcgttatgcctgatgtggtgacatataactcagttatcgatgcgctgtgcaaggccagagcaatggacaaggcagagtatttccttcgtcagatggttgataatggtgtcgtacctaataatgtcacatataatagcctcatccatggatattcctcttcaggccattggaaggaggcagttagggtattcaaagagatgacaagtcggagggttacagcagatgtgcatacttacaacatgtttatgacctttctttgcaaacatggaagaagcaaagaagctgcaggaatttttgataccatggctatgaagggcctgaaacctgacagcgtttcatatgctattcgccttcatggatatgccaccaaaggatgcttagttgatatgattaatctcttcaattcaatggaaagagattgtattctacctgactgtcgtatcttcaacatactgattaatgcatatgctaaatctgggaagcttgataaggctatgcttatcttcaatgaaatgcagaaacaaggagtgagtccaaatgcagtcacatattcaactgtaatagatgcattttgcaaaaagggtcagttggacgatgctatgataaagtttaatcagatgattgatacaggagtacgacagggcacagctgtttatcgttccctaatccagggattttgtacacacagcgatttggtgaaagcaaaggaattgcttactgaaatgatgaacaaaggtatacctcctcctgatattaagttcttccattcaatcatgcagaacctatgcacagaaggaagggtaatagaagcacgggatatccttggcttgatagcacacataggtatgaggcctaatgtttgcacatttaatatactgattggtggatactgcctagtcggcaagatggaggatgcctcaaaaatatttgatgatatgatgtcatatggtttagaaccttgtaacattacgtatggtatacttattaatggctattgcaaaaatagaaggattgatgacgggcttattctgttcaaagagatgctgcacaagggacttaaacctacaacctttaattataacgtcatactggatggattatttctggctggacgaactgttgctgcaaaggaaaagtttgacgagatggttgaatctggagtaagtgtgtgcattgatacatattcgatagttcttggtggactttgtagaaataattgtagcggcgaagcaatcacgctattccagaaattaagcacaatggaagtgaaattcaatattacaattgtcaatataatgattgatgctttctacaaggttcagcgaaaccaagaagccaaggatttgtttgctgcagtatcagccaatggtttggtagctgatgtctttacctacaccagaatgatgaaaaatcttataaaagaagggtcagtggaagaagctgacgatctctttttatcaatggagaagagcggctgtactgctgactcttatatgttaaatcttatcgtcagaatgtttctgggaaaaggagagatagtcaaggctgggaattatatatctaaaattgatgcaaagagctactcacttgaagctaaaactgtttcgctgcttatctctctcttttcagggaaagggaaatatagagaacacataggattgctccctgcaaagtatcggtttcgtgaagaagcagccacagttgtg

SEQ ID NO: 1900 - DNA, 690 bp, Triticum aestivum
  misc_feature 512: note = n is a, c, g, or t
  misc_feature 612: note = n is a, c, g, or t
  source 1..690: mol_type = genomic DNA
atggacaagttcaatgagatgactgatatgggttttcagccggacacaactgtttatcactccctaattcagggtttttgtatgcatggtgatttggttaaagctaaggggctggtttctgaaatgatgaacaaaggtattcctcgtcctgacattgcgttcttcaattcaataataaacactctatgcaaagaaggaggagttatggatgcacaagatgtctttgacttggttactgccatagatgagaggcctaatatcattacatttaattcactgattgatggatattgcttagttggcgagatggataaagcatttggagtacttgatgccatgaaatcagttggtgctgagcctgatattgttacatacaacacgcttgttaatggctattgtagaaatggaaggatcgatgatggtttgactctgttcagggaaatgccacataagagaataaaacctgacactgttacatatggcatcatactagatgggttgtttcatgctgnaagaactgtcgttgcaaggaaaatgttccatgagatgatcgaaagtgaaacracagtggacattcccgtatacaatayaatacttaaarrcctttttagntgtatcacatacaacctttcctcattaaaatcgtcgaggaaacaatgttttgacatcctatctgcaagatttcataaa

SEQ ID NO: 1901 - DNA, 963 bp, Triticum aestivum
  source 1..963: mol_type = genomic DNA
atggacaagttcaatgagatgactgatatgggttttcagccggacacaactgtttatcactccctaattcagggtttttgtatgcatggtgatttggttaaagctaaggggctggtttctgaaatgatgaacaaaggtattcctcgtcctgacattgcgttcttcaattcaataataaacactctatgcaaagaaggaggagttatggatgcacaagatgtctttgacttggttactgccatagatgagaggcctaatatcattacatttaattcactgattgatggatattgcttagttggcgagatggataaagcatttggagtacttgatgccatgaaatcagttggtgctgagcctgatattgttacatacaacacgcttgttaatggctattgtagaaatggaaggatcgatgatggtttgactctgttcagggaaatgccacataagagaataaaacctgacactgttacatatggcatcatactagatgggttgtttcatgctgcaagaactgtcgttgcaaggaaaatgttccatgagatgatcgaaagtgaaacgacagtggacattcccgtatacaatataatacttaaaggcctttgtagaaataattgtgcagacgaagcgatcgccatgttccagaaattaggtgcaatgaatgtgaagtttgatattggaacactcaataccatgattaattcattgtacaaggttggaagaaaagaagaagctaaggatttgtttgctgcaatatcagccagcaggttggtgcctaatgcttctacttacagcataatgataataaattatctgaaggaaggatcagtggaagatgctaagcatatttttttcatcaatggacaagagtggtatagctcccagctctcgtcttataaactatatcatcagaatgttgtttttttgagaaaatatcatcagaatgttgttggaaaaagg

SEQ ID NO: 1902 - DNA, 627 bp, Triticum aestivum
  source 1..627: mol_type = genomic DNA
atgaaatcagttggtgctgagcctgatattgttacatacaacacgcttgttaatggctattgtagaaatggaaggatcgatgatggtttgactctgttcagggaaatgccacataagagaataaaacctgacactgttacatatggcatcatactagatgggttgtttcatgctgcaagaactgtcgttgcaaggaaaatgttccatgagatgatcgaaagtgaaacgacagtggacattcccgtatacaatataatacttaaaggcctttgtagaaataattgtgcagacgaagcgatcgccatgttccagaaattaggtgcaatgaatgtgaagtttgatattggaacactcaataccatgattaattcattgtacaaggttggaagaaaagaagaagctaaggatttgtttgctgcaatatcagccagcaggttggtgcctaatgcttctacttacagcataatgataataaattatctgaaggaaggatcagtggaagatgctaagcatatttttttcatcaatggacaagagtggtatagctcccagctctcgtcttataaactatatcatcagaatgttgtttttttgagaaaatatcatcagaatgttgttggaaaaagg

SEQ ID NO: 1903 - DNA, 963 bp, Triticum aestivum; identical to SEQ ID NO: 1901
  source 1..963: mol_type = genomic DNA

SEQ ID NO: 1904 - DNA, 522 bp, Triticum aestivum
  source 1..522: mol_type = genomic DNA
atgccacataagagaataaaacctgacactgttacatatggcatcatactagatgggttgtttcatgctgcaagaactgtcgttgcaaggaaaatgttccatgagatgatcgaaagtgaaacgacagtggacattcccgtatacaatataatacttaaaggcctttgtagaaataattgtgcagacgaagcgatcgccatgttccagaaattaggtgcaatgaatgtgaagtttgatattggaacactcaataccatgattaattcattgtacaaggttggaagaaaagaagaagctaaggatttgtttgctgcaatatcagccagcaggttggtgcctaatgcttctacttacagcataatgataataaattatctgaaggaaggatcagtggaagatgctaagcatatttttttcatcaatggacaagagtggtatagctcccagctctcgtcttataaactatatcatcagaatgttgtttttttgagaaaatatcatcagaatgttgttggaaaaagg

SEQ ID NO: 1905 - DNA, 627 bp, Triticum aestivum; identical to SEQ ID NO: 1902
  source 1..627: mol_type = genomic DNA

SEQ ID NO: 1906 - DNA, 627 bp, Triticum aestivum; identical to SEQ ID NO: 1902
  source 1..627: mol_type = genomic DNA

SEQ ID NO: 1907 - DNA, 1962 bp, Triticum aestivum
  source 1..1962: mol_type = genomic DNA
atgccgagaagaagccggcccgcaggtggcatcctcatgggctgcttctgcggtgcgcatcgcccggacctagggcttgccttatttggccgcttcctcgggacaggcctcaagacaaacaagattgtggccaccaccttcctcaagtgcctctgctacgccaaacgtacagatgaggctgtcaacttgctgcttcgtaggatgcccgagcttggctgcgtgcctgatgcaatctcatacaccattgttctgaagagcttatgcgagaatagcatgagtcagcgggcacttgacctgctccagatggtggcagaaggaggaggtgcctgctccctcaatgtggtggtgtatagcacagtcatccatggcttcttcaaggagggcgaaacaggcaaggcatgcaatctattccatgaaatgatccatcaaggggttgtgcccaatgtggtcacgtatagctcgattattgatgcgttgtgcaaggccagagcaatggacaaggcagagctagtccttcaacagatggttgatagtggtgctcaaccaaataatgtgacatatacttgcatgatccatggatattccacatcagggcagttgaaagaggctgctaaaatgtttaggaaaatgacaacccggggtcttgtaccagatattgttacttgcagctcgttaatgactttcctttgcaagcatggaagaagcaaagaagcggcagaaattttttattccatgactgccaaaggcctcaaacctaatatcatcgcatactctattctgcttcacggatatgccaccgaaggatgctttgttgatatgaataatctctttaattcaatggaagacaatggtattgcagccaactgttatgttttcaacatattaatttatgcatatgctaaacgtggaatgatggatgaagctatgctcatatttaccgaaatgcgggaaaaaggagtgagtcccgatgtagtcacctattccactgtaatagccgcattttgcagattgcgtaggctggccaatgctatggacaagttcaatgagatgactgatatgggttttcagccggacacaactgtttatcactccctaattcagggtttttgtatgcatggtgatttggttaaagctaaggggctggtttctgaaatgatgaacaaaggtattcctcgtcctgacattgcgttcttcaattcaataataaacactctatgcaaagaaggaggagttatggatgcacaagatgtctttgacttggttactgccatagatgagaggcctaatatcattacatttaattcactgattgatggatattgcttagttggcgagatggataaagcatttggagtacttgatgccatgaaatcagttggtgctgagcctgatattgttacatacaacacgcttgttaatggctattgtagaaatggaaggatcgatgatggtttgactctgttcagggaaatgccacataagagaataaaacctgacactgttacatatggcatcatactagatgggttgtttcatgctgcaagaactgtcgttgcaaggaaaatgttccatgagatgatcgaaagtgaaacgacagtggacattcccgtatacaatataatacttaaaggcctttgtagaaataattgtgcagacgaagcgatcgccatgttccagaaattaggtgcaatgaatgtgaagtttgatattggaacactcaataccatgattaattcattgtacaaggttggaagaaaagaagaagctaaggatttgtttgctgcaatatcagccagcaggttggtgcctaatgcttctacttacagcataatgataataaattatctgaaggaaggatcagtggaagatgctaagcatatttttttcatcaatggacaagagtggtatagctcccagctctcgtcttataaactatatcatcagaatgttgttggaaaaagg

SEQ ID NO: 1908 - DNA, 1992 bp, Triticum aestivum
  source 1..1992: mol_type = genomic DNA
atgccgagaagaagccggcccgcaggtggcatcctcatgggctgcttctgcggtgcgcatcgcccggacctagggcttgccttatttggccgcttcctcgggacaggcctcaagacaaacaagattgtggccaccaccttcctcaagtgcctctgctacgccaaacgtacagatgaggctgtcaacttgctgcttcgtaggatgcccgagcttggctgcgtgcctgatgcaatctcatacaccattgttctgaagagcttatgcgagaatagcatgagtcagcgggcacttgacctgctccagatggtggcagaaggaggaggtgcctgctccctcaatgtggtggtgtatagcacagtcatccatggcttcttcaaggagggcgaaacaggcaaggcatgcaatctattccatgaaatgatccatcaaggggttgtgcccaatgtggtcacgtatagctcgattattgatgcgttgtgcaaggccagagcaatggacaaggcagagctagtccttcaacagatggttgatagtggtgctcaaccaaataatgtgacatatacttgcatgatccatggatattccacatcagggcagttgaaagaggctgctaaaatgtttaggaaaatgacaacccggggtcttgtaccagatattgttacttgcagctcgttaatgactttcctttgcaagcatggaagaagcaaagaagcggcagaaattttttattccatgactgccaaaggcctcaaacctaatatcatcgcatactctattctgcttcacggatatgccaccgaaggatgctttgttgatatgaataatctctttaattcaatggaagacaatggtattgcagccaactgttatgttttcaacatattaatttatgcatatgctaaacgtggaatgatggatgaagctatgctcatatttaccgaaatgcgggaaaaaggagtgagtcccgatgtagtcacctattccactgtaatagccgcattttgcagattgcgtaggctggccaatgctatggacaagttcaatgagatgactgatatgggttttcagccggacacaactgtttatcactccctaattcagggtttttgtatgcatggtgatttggttaaagctaaggggctggtttctgaaatgatgaacaaaggtattcctcgtcctgacattgcgttcttcaattcaataataaacactctatgcaaagaaggaggagttatggatgcacaagatgtctttgacttggttactgccatagatgagaggcctaatatcattacatttaattcactgattgatggatattgcttagttggcgagatggataaagcatttggagtacttgatgccatgaaatcagttggtgctgagcctgatattgttacatacaacacgcttgttaatggctattgtagaaatggaaggatcgatgatggtttgactctgttcagggaaatgccacataagagaataaaacctgacactgttacatatggcatcatactagatgggttgtttcatgctgcaagaactgtcgttgcaaggaaaatgttccatgagatgatcgaaagtgaaacgacagtggacattcccgtatacaatataatacttaaaggcctttgtagaaataattgtgcagacgaagcgatcgccatgttccagaaattaggtgcaatgaatgtgaagtttgatattggaacactcaataccatgattaattcattgtacaaggttggaagaaaagaagaagctaaggatttgtttgctgcaatatcagccagcaggttggtgcctaatgcttctacttacagcataatgataataaattatctgaaggaaggatcagtggaagatgctaagcatatttttttcatcaatggacaagagtggtatagctcccagctctcgtcttataaactatatcatcagaatgttgtttttttgagaaaatatcatcagaatgttgttggaaaaagg

SEQ ID NO: 1909 - DNA, 1992 bp, Triticum aestivum; identical to SEQ ID NO: 1908
  source 1..1992: mol_type = genomic DNA

SEQ ID NO: 1910 - DNA, 2364 bp, Triticum aestivum
  source 1..2364: mol_type = genomic DNA
atgcctcgtttctcctccaccacgtcaatgtcgtcactccgcctccgcctccacgcccgccactcctcctccgcctctcaaccctcacacagccagggatgggatccccacgccgccttcgccgccgcgacgcagcgtgcgcgctctggcagcctcaccccggcggacgcacaccacctgttcgacgaattgctgcggcaggccaatcctgtccaggagcgccccctcaacaaccttctcgccgccatcgcccgcgctccggcgtccaacgcctgcagaaacggccctgcactcgcggtcgccctcttcagccgcatatcccaaggcgcccgcctatgggtggtgcagccaacggcttgcacctacggcatcctcatggactgctgctgccgtgcacgccgccctgatctgtcactcgccttctttggccgtctcctcaagacgggcctggaggcaaaccaagtcgtcttcaacaccctcctcaagggcctttgccacacaaagcgggcggatgaggctctagacgtgctgctgcacaggatgcctgagctgggctgcacccccgacgtggtggcgtataacaccgttatccatggcttctttaaggagggccatgtaagcaaggcctgcaatctgttccatgaaatggcgcagcagggcgttaagcctaatgtggtgacatataactcagttatcgatgcgctgtgcaaggccagagccatggacaaggcagaggtggtccttcgtcagatgattgatgatggtgttggacctgataatgtgacgtatagtagcctcatccatggatattcctcttcaggccactggaaggaggcagttagggtattcaaagagatgacaagtcggagggttacaccaaatgtgcatacttacaacatgtttataacctttctttgcaaacatggaagaagcaaagaagctgcaggaatttttgattccatggctatgaagggcctgaaacctgacaacgtttcatatgctattctccttcatgggtatgccaccgaaggatgcttagttgatatgattaatctcttcaattcaatggaaagagattgtattctacctaactgtcgtatcttcagcatactgattaatgcctatgctaaatctgggaagcttgataaggcaatgcttatatttaaagaaatgcagaaacaaggagtgagtccagatgcattcacatattcaaccgtaatacatgcattttgcaaaaagggtaggttggatgatgctgtgataaagtttaatcagatgattgatacaggagtacgaccggacacggctgtttatcgttccctaatccagggattttgtacacatggcgatttggtgaaagcaaaggaatatgttactgaaatgatgaagaaaggtatgcttcctcctgatattatgttcttcagttcaatcatgcagaacctatgcacagaaggaagggtaacagaagcacgggatatccttgacttgatagtgcacattggtatgaggcctaatgttatcatatttaatttgctgatcggtggatactgcctagtccgcaagatggcagatgcattgaaagtatttgatgatatggtgtcatatggtttagaaccttgtaactttacgtatggtatacttattaatggctattgcaaaaatagaaggattgatgacgggcttattctgttcaaagagatgctgcacaagggacttaaacctacaacttttaattataacgtcatactggatggattatttctggctggacaaactgttgctgcaaaagagaagttcgatgagatggttgaatctggagtaagtgtgtgcattgatacatactctatagttcttggtggactttgtagaaatagctgcagtagcgaagcgatcacccttttccggaaattaagcgcaatgaatgtgaaatttgatattacaattgtcaatatcattattggtgccttatacagggtcgagagaaaccaagaggctaaggatttgtttgctgctatgccagccaatggcttggttcctaatgctgttacctacaccgtaatgatgacaaatcttataaaagaaggttcagtggaagaagctgacaatcttttcttatccatggagaagagcggctgtactgccaactcttgcctgttaaatcatatcatcagaaggttactggaaaaaggagagatagtcaaggctggaaattatatgtctaaagttgatgcaaagagctactcacttgaagctaaaactgtttcactgctgatctctctgttttcaaggaaagggaaatatagagaacacatcaaattgcttcctacaaagtatcagtttctggaagaagcagccacagttgaa

SEQ ID NO: 1911 - DNA, 2334 bp, Triticum aestivum
  source 1..2334: mol_type = genomic DNA
atgtccaacctccgcctcctacgccgcagctcctcctccatgtccaccaccaggtcgccactctcacgggtctggtccccccattcggcctttgccgcggccacagagcgcgtacgcaccgggacgctcagccaagacgatgcacaccacctgttcgacgaattgctgcggcagggcaatcctgtccaggagcgtcccttgaataactttctggctgccctcgcccgcgcgcccgcgtctgcatcctgcagcgatggccccgccctggccgtcgccctcttcggccgtttgtcccgaggcgccgggcaacgggtggcgcagccaaatgtgttcacctatggcgtcctcatggactgctgctgccgcgcttgccgcacagatctggcgctcgccttctttggccgtcttctcaggacgggcctgcaggcaggccaagtcgtcttcaacaccctcctcaagggcctttgccacacaaagcgggcggatgaggctctggacgtgcttcttcacaggatgcctgagctgggctgcacccccgatgtggtggcgtataacaccgtcatccatggcttctttagggaaggccaagtaggcaaggcatgcgatatgttccatggaatggcacagaagggtgttatgcctaatgtggtgacatataactcggttattgatgcgctgtgcaaggccagggccatggacaaagcagagacggtccttagtcaaatggtaaatgatggtgtccgacctgataacgtgacatataatagtctcattcatggatattcctctttgggcaattggaaggaggcggttagggtattcaaagagatgagtcggaggtttacaccagatgtcattacctgcacctcactcatggccttcctttgcaagaatggaaaaagcaaagaagctgcagaaatttttgattcaatggctatgaagggcctgaaacgtgacaccgtttcatatgctattctccttcatgggtatgccactgaaggatgcttggttgacatgattaatctcttcaattcaatggcaacagactgtattctacctaactgtcatatcttcaatatactgattaatgcatatgctaaatctggcatgatgggtgaggccatgcttatattcaaaaaaatgcacgaacaaggagtgagtccagatgtagtcacctattcaactgtaatacatgcattttgcaaaatgggtagcttggacattgctatggacaaatttaaccagatggttgatatgggagtacgaccgaatgcaattgtttatcattccctaatccagggtttttgtacacatggggatttagtgaaagcaaaggaattggttactgaaatgaggaacaaagctatgcgtcctcctgatattaagatcttccattcaataatgaagaacctatgcacggaaggaagggtaatagaagcacgggatatcctcgacttgatggtgcacataggtatgaggcctgatgttcccatctttaatttactgattggtggatactgcctagtccacaagatggaggatgcaacaaaaatgtttgatgatatggtgtcatatggtttagaaccttgtaacagtacgtatggtatacttattaatggctattgcaaaaacggaaggattgatgacgggctgaatctgttcaaagaaatgttgcgcaagggacttaaacctacaacttttaattacaacgtcatactggatggattatttctggctggacgaactgttgctgcaaaggaaaagtttgatgagatggttgaatctggagtaagtgtgtgcattgatacatattcgatagttcttggtggactttgtagaaataattgcaccggtgaagcaatcacgctgtccaagaaattaagtacaatgaatgtcaaattcaatattgcaattgtcaatatcttgattggtgcattcttcagggttcgacgaaaccaagaagctaaggatttgtttgccgcaataccagccaatggcttggtagctaatgttgttacctacagcatgatgatgataaatcttataaaagaagggtcactggaagaagctgacgatctctttttatcaatggagaagagcggctgtaccgctgactcttgtatgttaaatcatatcatcagaaggctactggaaagaggagagatagtcaaggctggaaattatatgtcgaaagttgatgcaaagagctactcacttgaagctaaaactgtttcgctgctgatctccctctttttagggaaagggagatatagagaacacatgaaattgctccctatgaagtatcagtttctcgaagaagcagccacagttgaa

SEQ ID NO: 1912 - DNA, 2370 bp, Triticum aestivum
  source 1..2370: mol_type = genomic DNA
atgcctcgcttctcctccaccacgcccatgtcgccactccgcctccgcctccgcctccgactcggcgcccgccactcctcctccacctcccattcctcacgcagctgggatccccactccgccttcgccgccgccgcggagcgtgcgcgctctggcaacctcaccccggaggacgcacaccacctgttcgacgaattgctccggcagggcaatcctgtccaggaccgccccttgaacaaacttctctccgccctcgcccgtgctccggcgtctgcggcctgtagaaacggccctgcactcgcggtcaacctcttcagccgcatatcccaaggtgcccgccgacgtgtggcggagccaacggcctgcacctacggcatcctcatggactgctgctgccgcgcacaccgcctcgatctgacgctggccttcttcggcggtctccttaagacgggacttaaggcaggcgtcattcaagtttgcactcttctcaagggcctctgccgcgcaaagcgggctgatgaggctctcgacgtgctgcttcacaggatgcctgagctgggctgcacccctgacgtggtggcatataccacggtcatccacggcttctttaaggaaggccaagtaggcaaggcatgcaatctgttccatggaatggcgcagcagggcgttgcgcctaatttggtgacatataactcggttattgatgcgttgtgcaaggccaaagcaatggacaaggcagagtatttccttggtcagatggttgatgatggtgtcgtacctgataatgtgacatataatagcctcatccatggatattcctcttcaggccactggaaggaggcagttagggtattcaaagagatgacaagtcggagggttacagcagatgtgcatacttacaacatgtttatgacctttctttgcaaacatggaagaagcaaagaagctgcaggaatttttgataccatggctatcaagggcctgaaacctgacaatgtttcatatgctattcgccttcatgggtatgccaccgaaggatgcttagttgatatgattaatctcttcaattcaatggaaagagattgtattctacctgactgtcgtatcttcagcatactgattaatgcatatgctaaatctgggaagcttgataaggctatgcttttatttaaagaaatgcagaaacaaggagtgagtccagatgcagtcacatattcaactgtaatagatgcattttgcaaaaagggtcagttggacgatgctatgataaagtttaatcagatgattgatacaggagtacgacagggcacagctgtttatggttctctaatccagggtttttgtacacacggcgatttggtgaaagcaaaggaattgcttactgaaatgatgaacaaaggtatacctcctcctgatattaagttcttccattcaatcatgcagaacctatgcacagaaggaagggtaatagaagcacaagatatccttgacctgatggtacacacaggtgagaggcctaatgttgtcacatttagtgtactggtcggtggatactgcctagtccgcaagatggcagatgcatcgaaagtatttgatgatatggtgtcatatggtttagaaccttgtaacattatgtatggaatacttattaatggctactgcaaaaatagaaggattgatgacgggcttattctgttcaaagagatgctgcacaagggacttaaacctacaacttttaattataacgtcatactgaatggattatttctggctggacaaactgttgctgcaaaagagaagtttgatgagatggttgaatctggagtaagtgtgtgcattggtacatactctatagttcttggtggactttgtagaaatggctgcagtagcgaagcgatcaccctgttccgaaaattaagcgcaatgaatgtgaaatttaatattacaattgtcaataccattattggtgccttctacagggtcgagagaaaccaagaggctaaggatttgtttgctgcagtatcagccaatggtttggtagctgatgtctttacctacaccataatgatgaaaaatcttataaaagaagggtcagtggaagaagctgacgatctctttttatcaatggagaagagcggctgtactgctgactcttatatgttaaatcttatcgtcagaatgtttctgggaaaaggagagatagtcaaggctgggaattatatatctaaaattgatgcaaagagctactcacttgaagctaaaactgtttcgctgcttatctctctcttctcagggaaagggaaatatagagaacacataggattgctccctgcaaagtatcggtttcgtgaagaagcagccacagttgtg

SEQ ID NO: 1913 - DNA, 2376 bp, Triticum aestivum
  source 1..2376: mol_type = genomic DNA
atgcctcgcttctcctccaccacgccaatgtcgccaccccgcctcctcctccggctcggcgcccgccactcctcctccacctctcatccctcacgcatctgggatccccacgccgccttcgccgctgcgacgcagcgggcgcgctctggcacgctcaccacggaggacgcacaccacctgtttgatgaattgctgcggcagggcaatcctgtccaggagcgtcccttgactaactttctggctgccctcgcccgcgcgcccgcgtccgcattctgcagcgatggccctgccctggccgtcgccctcttcggccgtttgtcccgaggcgccggacgacgggtggcgcagccaaatgtcttcacctatggcgtcctcatggactgctgctgccgtgcgcgccgcctggatctagcgatcgccttcttcgcccgtctcctcaagacgggactggaggcaaaccaagtcatcttctgcaccctcctcaagggactctgccacgcaaagcgctcagatgaggctttggacgtggtgcttcacaggatgcctgagctaggctgcacccccaacgtggtggcctataccacggtcatccacggcttcttgaaggaaggccaagtaggcaaggcatgcaatctattccatggaatggcgcagcagggcgttgcgcctgatgtggtgacatataactcggttatcgatgcgttgtgcaaggccagagcaatggacaaggcagagtatttccttcgtgaaatggttgataatggtgtcgtacctaataatgtgacatataatagcctcatccatggatattcctctttgggccatcagaaggaggctgttagggtgctgaaagaaatgacaagacagggtatcataccagatgtcattacctgcacctcactcatgaccttcctttgcaagaatggaaaaagcaaggaagctgcagaaatttttgattcaatggccacgaagggcctgaaacatgacgccgtttcatatgctattctccttcatgggtatgccactgaaggatgcttggttgatatgattaatctcttcaattcgatggacagagactgtattctacctaactgtcatatcttcaacatactgatttatgcatatgctaaatctgggaagcttgataaggctatgcttatatttagagatatgcagaaacaaggagtgagcccagatgcattcacatattcaaccttaatacatgcattttgtaaaaagggtcggttggacgatgctatgataaagtttaatcagatggttgatacaggagtacgacagggcacagctgtttatggttctctaatccagggtttttgtacacacggcgatttggtgaaaggaaaggaattggttactgaaatgatgaacaaaggtatacctcctcctgacattatgttcttccattcaatcatgcagaacctatgcacagaaggaagggtagtagaagcacgggatatccttggcttgatagcacacataggtatgaggcctaatgtttgcacatttaatatactgattggtggatactgcctagtccgcaagatggaggatgcctcaaaaatatttcatgatatgatgtcatatggtttagaaccttctaatgttacgtatggtattcttattaatggctattgcaaaaacagaaggattgatgacgggctgattctgttcaaagaaatgttgcgcaagggacttaaacctacaacttttaattacaacatcatactggatggattatttctggctggacgaactgttgctgcaaaggaaaagtttgatgagatggttgaatctggagtaagtatgtgcatcagtacttactctatagttcttcgtggactttgtagaaataattgtagcggcgaagccatcacgctattccagacattaagcgcaatggatgtgaaattcaatattagaattgtcaatatcatgattgatgccttcttcagggttcagcgaaagcaagaagctaaggatttgtttgctgcaataacagccaatgggttggttgctaatgtttttacctacagcctaatgatgacaaatcttataaaagaagggtcagtggaagaggctgacacactctttttatcgatggagatgagcggctgtacttcgaactcgtggatgttaaatcttattatcagagggttgctggaaaaaggagagatagtcaaggctggatgttatatgtctaaagttgatgcgaagagctactcacttgaagctaaaactgtttcgttgctgatctatctcttttcagggaaagggaaatacagagaacacataagattgctacctacaaagtatcagtttctcgaagaagcagccacagttgaatggtttgctata

SEQ ID NO: 1914 - DNA, 2376 bp, Triticum aestivum
  source 1..2376: mol_type = genomic DNA
atgcctcgcttctccaccaccacgccaatgtcgccaccccgcctcctcctccgactcggcgcccgccactcctcctccacctctcatccctcacgcatctgggatccccacgccgccttcgccgctgcgacgcagcgggcgcgctctggcacgctcaccacggaggacgcacaccacctgtttgatgaattgctgcggcagggcaatcctgtccaggagcgtcccttgactaactttctggctgccctcgcccgcgcgcccgcgtccgcattctgcagcgatggccctgccctggccgtcgccctcttcggccgtttgtcccgaggcgccggacgacgggtggcgcagccaaatgtcttcacctatggcgtcctcatggactgctgctgccgtgcgcgccgcctggatctagcgatcgccttcttcgcccgtctcctcaagacgggactggaggcaaaccaagtcatcttctgcaccctcctcaagggactctgccacgcaaagcgctcagatgaggctttggacgtggtgcttcacaggatgcctgagctaggctgcacccccaacgtggtggcctataccacggtcatccacggcttcttgaaggaaggccaagtaggcaaggcatgcaatctattccatggaatggcgcagcagggcgttgcgcctgatgtggtgacatataactcggttatcgatgcgttgtgcaaggccagagcaatggacaaggcagagtatttccttcgtgaaatggttgataatggtgtcgtacctaataatgtgacatataatagcctcatccatggatattcctctttgggccatcagaaggaggctgttagggtgctgaaagaaatgacaagacagggtatcataccagatgtcattacctgcacctcactcatgaccttcctttgcaagaatggaaaaagcaaggaagctgcagaaatttttgattcaatggccacgaagggcctgaaacatgacgccgtttcatatgctattctccttcatgggtatgccactgaaggatgcttggttgatatgattaatctcttcaattcgatggacagagactgtattctacctaactgtcatatcttcaacatactgatttatgcatatgctaaatctgggaagcttgataaggctatgcttatatttagagatatgcagaaacaaggagtgagcccagatgcattcacatattcaaccttaatacatgcattttgtaaaaagggtcggttggacgatgctatgataaagtttaatcagatggttgatacaggagtacgacagggcacagctgtttatggttctctaatccagggtttttgtacacacggcgatttggtgaaaggaaaggaattggttactgaaatgatgaacaaaggtatacctcctcctgacattatgttcttccattcaatcatgcagaacctatgcacagaaggaagggtagtagaagcacgggatatccttggcttgatagcacacataggtatgaggcctaatgtttgcacatttaatatactgattggtggatactgcctagtccgcaagatggaggatgcctcaaaaatatttcatgatatgatgtcatatggtttagaaccttctaatgttacgtatggtattcttattaatggctattgcaaaaacagaaggattgatgacgggctgattctgttcaaagaaatgttgcgcaagggacttaaacctacaacttttaattacaacatcatactggatggattatttctggctggacgaactgttgctgcaaaggaaaagtttgatgagatggttgaatctggagtaagtatgtgcatcagtacttactctatagttcttcgtggactttgtagaaataattgtagcggcgaagccatcacgctattccagacattaagcgcaatggatgtgaaattcaatattagaattgtcaatatcatgattgatgccttcttcagggttcagcgaaagcaagaagctaaggatttgtttgctgcaataacagccaatgggttggttgctaatgtttttacctacagcctaatgatgacaaatcttataaaagaagggtcagtggaagaggctgacacactctttttatcgatggagatgagcggctgtacttcgaactcgtggatgttaaatcttattatcagagggttgctggaaaaaggagagatagtcaaggctggatgttatatgtctaaagttgatgcgaagagctactcacttgaagctaaaactgtttcgttgctgatctatctcttttcagggaaagggaaatacagagaacacataagattgctacctacaaagtatcagtttctcgaagaagcagccacagttgaatggtttgctata

SEQ ID NO: 1915 - DNA, 2376 bp, Triticum aestivum; identical to SEQ ID NO: 1913
  source 1..2376: mol_type = genomic DNA

SEQ ID NO: 1916 - DNA, 2376 bp, Triticum aestivum; identical to SEQ ID NO: 1914
  source 1..2376: mol_type = genomic DNA

SEQ ID NO: 1917 - DNA, 2364 bp, Triticum aestivum
  source 1..2364: mol_type = genomic DNA
atgcctcgcttctcctccaccatgccaatgtcgccaccccacctcctcctccgactctgcgcccgccactcctcctccacctctcatccctcacgcatctgggatccccacgccgcctttgccgccgcgacgcagcgggcgcgctctggcacgctcaccacggaggacgcacaccacctgttcgacgaattgctgcggcagggcaatcctgtccaggagcgtcccttgactaactttctggctgccctcgcccgtgcgcccgcgtccgcatcctgcagcgacggccccgccctggccgtcgccctttttggccgtttgtctcgaggcgctggacgacgggtggcacagccaaatgtcttcacctatggcgtcctcatggactgctgctgccgtgcgcgtcgcctggatctagcgatcgccttcttcggtcgtctcctcaagacgggcctggaggcagaccgagtcgttttcagcaccctcctcaagggactctgccacgcaaagcgctcagatgaggctctggacgtgctgcttcacaggatgcctgagcagggatgcactccctatgtggtggcgtataacaccgtcatccatggcttctttagggaaggccaagtaggcaaggcgtgcgatctgttccatggaatggcacagcagggcgttatgcctgatgtggtgacatataactcggttatcgatgcgctgtgcaaggccagagcaatggacaaggcagagtatttccttcgtcagatggttgatgatggtgttgtacctaataatgtgacatataatagcctcatccatggatattcctcttcaggccattggaaggaggcaattagggtattcaaagagatgacaagtcggaggattacagcagatgtgcatacttacaatatgtttatgacctttctttgcaaacatggaagaagcgaagaagctgcaggaatttttgataccatggctatgaagggcctgaaacctgacaacgtttcatatgctattcgccttcatgggtatgccaccgaaggatgcttagttgatatgattaatctcttcaattcaatggaaagagactgtattctacctgactgttgtatcttcaacatactgattaatgcatatgctaaatctgggaagcttgataaggctatgcttatcttcaatgaaatgcagaaacaaggagtgagtccagatgcagtcacatatttacccgtaatagatgcattttgcaaaaagggtaggttggacgatgctatgattatgtttaatcagatgattgatacaggagtacgaccagccacagctgtttatacttccctaatccaaggtttttgtacacacggcgatttggtgaaagcaaaggaattggttactgaaatgatgaacaaaggtatacctcctcctgatattaagttcttccattcaatcatgcagaacctatgcacagaaggaagggtaacagaagcacgggatatccttggcttgatagcacacataggtatgaggcctaatgtttgcacatttaatatactgattggtggatactgcctagtccgcaagatgacagatgcatcgaaagtatttgatgatatggtgtcatatggtttagaaccttgtaactttacgtatggtatacttattaatggctattgcaaaaatagaaggattgatgacgggcttactctgttcaaagagatgctgcacaagggacttaaacctaaagcttttaattataacgtcatactggatggattatttctggctggacaaactgttgctgcaaaagagaagtttgatgagatggttgaatctggagtaagtgtgtgcattgatacatactctatagttcttggtggactttgtagaaatagctgcagtagcgaagcgatcaccctgttccgaaaattaagcgcaatgaatgtgaaatttgatattacaattgtcaataccattattggtgccttctatagggtcgagagaaaccaagaggctaaggatttgtttgctgctattccagccagtggcttggttccgaatgttgttacctataccataatgatgaaaaatcttataaaagaaggttcagtggaagaagctgacaatctttttttatcgatggagaagagcggctgtagtgccaactcttatctgttaaatcatatcatcagaaggttactggaaaaaggagagagagtcaaggctggaaattatatgtctaaagttgatgcaaagagctactcacttgaagctaaaactgtttcgctgctgatctctctgttttcaaggaaagggaaatatagagaacacatcaaattgcttcctacaaagtatcagtttctggaagaagcagccacagttgaa

SEQ ID NO: 1918 - DNA, 2226 bp, Triticum aestivum
  source 1..2226: mol_type = genomic DNA
atgtcgccgctccgcctccatgcccgccgctcctactccacctcgcatcccccacgcagccagggctgggatccccacgccgccttcgcagctgccacggagcgcgcgcgatctggcaacctcacctcggaggacgcacacaagctgttcgaccaattgctcctgcaggctaatccggtcaacatgcgccttcccaacgaccttctcaccgccctggctcgcgcgcctgcgtccgcagcctgcagcaacggccccgccctcgccgtcaccctcttcacccgtttgtcccgaggtgcccgccaaccggtggtgcagccaacggcctgcacctacggcatcctcatggactgctgctgccgcgcaaaccgtcaggatctggcgctcgccttcttcgcccgtctcctcaggacgggactcaaggcaggcgtcatagaagtcaacactcttctcaagggactctgccgcgcaaagcgggctgatgaggctctggacattctgcttcacaggatgcctgagcttggctgcacccccaacgtggtggcctataccacggtcatccacggcttcttgaaggaaggccaagtaggcaaggcatgcaatctattccatggaatggcgcagcagggcgttgcacctaatgtggtgacatataactcggttattgatgcgctgtgcaaggccagagccatggacaaggcagagtatttccttcgtcaaatggttgataatggtgtcgtacctgataatgtgacatataatagcctcatccatggatattcctcttcaggccattggaaggaggcggtaagggtgctgaaagaaatgacaagtcaaggtatcatacctgatatcgtttcataccgtattctgcttcatgggtatgccaccaaagggtgcttagttgatatgattaatctcttcaattcaatggcaagatactgtattctacctgattgtcatatcttcaacatactgattaatgcatatgctaaatctgggaagcttgataaggctatgcttatatttaaagaaatgcagaaacaaggagtgagtccagatgcagtcacatattcaaccgtaatacatgcattttgcaaaaatggcaggttggacgatgctgtgataaagtttaatcaaatgattgatacaggagtacaaccggacacatctgtttataatgccctaatccaggggttttctacaaatggcgatttggtgaaggcaaaggaattggttacggaaatgatgaacaaaggtatacctcctcctgatattaagttcttccattcaatcatgcagaacctatgcacagaaggaaggttaacagaagcacgggatatccttggcttgatagcacacataggtatgaggcctaatgtttgcacatttaatatactgattggtggatactgcctagtccgcaagatggcagatgcatcgaaagtatttgatgatatggtgtcatatggtttagaaccttgtaactttacgtatggtatacttattaatggctattgcaaaaatagaaggattgatgacgggcttattctgttcaaagagatgctgcacaagggacttaaacctacaacttttaattataacgtcatactggatggattatttctggctggacaaactgttgctgcaaaggaaaagtttaatgagatggttgaatctggagtaagtgtgtgcattgatacatactcgatagttcttggtggactttgcacaaataactgttgcggcgaagccatcacgctattccagaaattaagcacaatggaagtgaaattcgatattataattgtcaataccatgattgatgccttctacagggttcggcaaaaccaagaagctaaggatttgtttgctgcagtatcagccaatggtttggtagctaatgtctttacctacaccataatgatgacaaatcttataaaagaagggtcactggaagaagctgacaatctctttttatcaatggagaagagcggctgtactgctgactcttttatgttaaatcttatcattagaaggttactggaaaaaggagagatagtcaaggctggaaattatatttctaaagttgatgcaaagagctactcccttgaagctaaaactgtttcgcttcttatctctctcttttcagggaaagggaaatatagagcacacatcagattgctcccttcaaagtatcagtttcgtgaagaagcaggcacagttgaa

SEQ ID NO: 1919 - DNA, 861 bp, Triticum aestivum
  source 1..861: mol_type = genomic DNA
atgaggcctaatgtttgcacatttaatatactgattggtggatactgcctagtccgcaagatggcagatgcatcgaaagtatttgatgatatggtgtcatatggtttagaaccttgtaactttacgtatggtatacttattaatggctattgcaaaaatagaaggattgatgacgggcttattctgttcaaagagatgctgcacaagggacttaaacctacaacttttaattataacgtcatactggatggattatttctggctggacaaactgttgctgcaaaggaaaagtttaatgagatggttgaatctggagtaagtgtgtgcattgatacatactcgatagttcttggtggactttgcacaaataactgttgcggcgaagccatcacgctattccagaaattaagcacaatggaagtgaaattcgatattataattgtcaataccatgattgatgccttctacagggttcggcgaaaccaagaagctaaggatttgtttgctgcagtatcagccaatggtttggtagctaatgtctttacctacaccataatgatgacaaatcttataaaagaagggtcactggaagaagctgacaatctctttttatcaatggagaagagcggctgtactgctgactcttttatgttaaatcttatcattagaaggttactggaaaaaggagagatagtcaaggctggaaattatatttctaaagttgatgcaaagagctactcccttgaagctaaaactgtttcgcttcttatctctctcttttcagggaaagggaaatatagagcacacatcagattgctcccttcaaagtatcagtttcgtgaagaagcaggcacagttgaa

SEQ ID NO: 1920 - DNA, 867 bp, Triticum aestivum
  source 1..867: mol_type = genomic DNA
atgcagaaacaaggagtgagtccagatgcagtcacatattcaaccgtaatacatgcattttgcaaaaatggcaggttggacgatgctgtgataaagtttaatcaaatgattgatacaggagtacaaccgaacacatctgtttataatgccctaatccaggggttttctacaaatggcgatttggtgaaggcaaaggaattggttacggaaatgatgaacaaaggtatgcatcctcctgatattaaggtcttccattcggtaatgcagaacctatgcacagaaggaagggtaacagaagcacgggatatccttgacttgatagtgcacataggtatgaggcctgatgttttcacatttacttcactgatcggtggatactgcctagtccgcaacatggaggatgcatcaaaaatatttgatgatatggtgtcatatggtttagaaccttctaacatcacgtatggtatacttattaatggctattgcaaaaacaaaaggattgatgaggggctgattctgttcaaagaaatgttgcgcaagggacttaaacctacaactattaattacaatgtcatattggatggattatttctggctggacgaactgttgctgctaaggaaaagtttaatgagatggttgaatctggagtaagtgtgtgcattgatacatattcgatagttcttggtggactttgcacaaataactgttgcggcgaagccatcacgctattccagaaattaagcaaaatgaatgtgaaattcaatattagaattgtcaatatcatgattgatgccttcttcaaggttcagcgaaagcaagaagctgaggatttgtttgctgcaatatcagcaaatgggttggtttgc

SEQ ID NO: 1921 - DNA, 2307 bp, Triticum aestivum
  source 1..2307: mol_type = genomic DNA
atgccccgtcgtctcccacccgtcttgctcccacttcacaccaaggccatgcctcgcctctcctccaccacgcccatgtcgccactccgcctccgcctccgcctccgcgcccgccactccgcctccacctcccattcctcacgcagctgggagccccacgccgccttcgccgccgccacggagcgcgcgcgctcttgcaacctcaccccggaggacgcacaccacctgttcgacgaattgctgcggcaggccaaacctgtccaggagcgccccctcaacaaccttcttgccgccctcgcccgtgctccggcgtccgcggcgtgcagcgatggccctgcactcgcggtcaacctcttcggccgcatatcccaaggcgcccgccgacgtgtggcgcacccaacggcctgcacatacggcatcctcatggactgctgctgccgcgcacaccgcctcgatctggcgttcgctttcttcggccatctcctcaggacgggacttaaggcaggcgtcattcacgtttgcactcttctcaagggcctctgccgcgcaaagcgggctgatgaggctctcgacgtgctgcttcacaggatgcctgagctgggctgcactcccgatgtggtggcatataccacggtcatccacggcttctttaaggaaggccaagtaagcaaggcatgcaatctattccatgaaatggcgctgcagggcgttgcacctaatgtggtgacatatagctcggttattgatgcgctgtgcaaggccagagccatggacaaggcagagtatttccttcgtcagatggttcataatggtgtcctagctaataatgtgacatataatagcctcatccatggatattcctcttcaggccattggaaggaggcggttagggtgctgaaagaaatgacaagtcaaggtatcatacctgatatcgtttcataccgtattctgcttcatgggtatgccaccgaagggtgcttagttgatatgattaatctcttcaattcaatggcaagatactgtattctacctgattgtcatatcttcaacatactgattaatgcatatgctaaatctgggaagcttgataaggctatgcttatatttaaagaaatgcagaaacaaggagtgagtccagatgcagtcacatattcaaccgtaatacatgcattttgcaaaaatggcaggttggacgatgctgtgataaagtttaatcaaatgattgatacaggagtacaaccgaacacatctgtttataatgccctaatccaggggttttctacaaatggcgatttggtgaaggcaaaggaattggttacggaaatgatgaacaaaggtatgcatcctcctgatattaaggtcttccattcagtaatgcagaacctatgcacagaaggaagggtaacagaagcacgggatatccttgacttgatagtgcacataggtatgaggcctgatgttttcacatttacttcactgatcggtggatactgcctagtccgcaacatggaggatgcatcaaaaatatttgatgatatggtgtcatatggtttagaaccttctaacatcacgtatggtatacttattaatggctattgcaaaaacaaaaggattgatgaggggctgattctgttcaaagaaatgttgcgcaagggacttaaacctacaactattaattacaatgtcatattggatggattatttctggctggacgaactgttgctgcaaaggaaaagtttaatgagatggttgaatctggagtaagcgtgtgcattgatacatattcgatagttcttggtggactttgcacaaataactgttgcggcgaagccatcacgctattccagaaattaagcaaaatgaatgtgaaattcaatattagaattgtcaatatcatgattgatgccttcttcaaggttcagcgaaagcaagaagctgaggatttgtttgctgcaatatcagcaaatgggttggttgctaatgtttttacctacagcctaatgatgacaaatcttataaaagaagggtcagcggaagaagctgacactctctttttatcgatggagaagagcggctgtactgccaactcgtggatgttaaatcttattatcagaaggctactggaaaaaggagagatagtgaaggctggaaattatatggctaaagtcgatgcaaagagctactcacttgaagctaaaacggtttcgctgctgatttctctcttttcagggaaagggaaatacagagaacacataagattgctgcctacaaagtatcagtttcgtgaagaagcagccacagttgaa

SEQ ID NO: 1922 - DNA, 2349 bp, Triticum aestivum
  source 1..2349: mol_type = genomic DNA
atggctcgcctctgcttcaccacgcccatgccgcacctccgccgccgctactcctccttcacctcgcctccttcacgccgctgggacccccgacccgcctttgccgcagccacggagcgcgtccgcgccgggacgctcagccctgaagacgcacaccacctgttcgacgaattgctactgcaggccaaccccgtccccgagcgctccctcaacggcttccttgccgcgctcgcccgtgctccgtcctccgctactctcagagatggaccctcccttgctctcgccctcttcaaccgtgtctgccgagaagaagcaggaccgccggtggcgccgcccacagtccgcacctacaacatcctcatggacagctgctgccgtgcacgccgcccggacctaggccttgccttcttcggccgcttcctgagggcgggcctcaaggtaaacctgattgtcgccagcaccctactcaagtgcctctgccatgcaagacggacagatgaggctgtcaacatgctgcttcataggatgtccgagttcggttgtgtgcctgatgccatctcatactccatagtacttaagggcttatgtgacaatagcaggagccagcaagcgctcgatctgctccagatggtaaggaaaggaggtgcctgctccctcagtgtggtggcatatagcataatcatacatggcttctttaaggaaggggaagtaagcaaggcatgcaatctgttccatgaaatgatgcagcaaggggttgtaccagatgtggtcacatatagctccattattgatgcgctgtgcaaggtcagggcaatggacaaggcaaagttggtccttcagcagatggttaataatggtgttcgaccaaatatgtatacttggaactcattcatgtactccctgtgcaagcatggaagaagcaaagaagctgcagaattttttaactccatgaccgccaagggcctcaaacctgatattgtcgcgtactctactcttcttcacgggtatgctaccgaaggatgcctcaccgatatgattaatttctttaattcaatggaacgcaatggtattgtagccaactgcaaagttttcaccatattaattgatggatatgctaaatgtggaatgacagatgaagctatgctcatctttaccaaaatgcaagaacaaggagtaagtcctaatgtattcacctatgcaattgtaacagctgcactttgcagaatgggcaggctgtctgatgcaatggaaaaactaaatgagatgattgcaatgggcttacaaccgaacaaggttgtttatcactctctaattcaggtcttttgtacacatggtgatttggtgaaagcaaaggccttggtttctgaaatgatgaacaaaggtattcctcgtccaaacattgtgttcttcaactcagtaataaacagtctatgcaaggaaggaagagttacagatgcacacgatatcttcgacttggctataaacattggtgagaggcctgacgttattacatttaattcactgattgacggatattgtttagccgggaagatggataaagcattcggagtacttgatgccatggtttcatctggcattgagcccaatgttgtcacatacaatacacttgttggtggctattctagaaatggaaggattgatgatgggttgaccctattcagagaaatgatgcatatcaaaattaaacctacaactgcaacatatggcgccatacttcatgggttgtttcgtgctggcagaactttttctgcgaagaaaatgttcaatgagatgattgaaagtggaacaacagtgaacatttccatatatgctataattcttggaggactttgtagaaacaattgcgttgatgaagcaatcgtcttgttcgagaaattaggtgcaatgaatgtgaagttggatgttggaatattcaataccatgattaatgcaatgtacgcggttaagggaagagaagaagctgaggatttgtttgctgcaatatcagccaatgggttggtacctaatgcttcttcttacggtgttatgataacaaatcttctaagagaaggattagtggaagaagctgacaatatgttttcatcaatggacaagagtggttgtgctcctagctctcgtctgttaaataatatcatcagaatgttattggaaaaaggtgagatatctaaggctggaaattatatgtctaaagttgatggaaagaatatctcacttgaagcttcaactacttcactgctgctgtctctcttttcaagggaaggcaaatatcgggagcaaataaaattgctccctgccaagtatcaattttttgatggatccagccatagt

SEQ ID NO: 1923 - DNA, 2349 bp, Triticum aestivum; identical to SEQ ID NO: 1922
  source 1..2349: mol_type = genomic DNA

SEQ ID NO: 1924 - DNA, 2349 bp, Triticum aestivum; identical to SEQ ID NO: 1922
  source 1..2349: mol_type = genomic DNA

SEQ ID NO: 1925 - DNA, 2349 bp, Triticum aestivum; identical to SEQ ID NO: 1922
  source 1..2349: mol_type = genomic DNA

SEQ ID NO: 1926 - DNA, 2349 bp, Triticum aestivum; identical to SEQ ID NO: 1922
  source 1..2349: mol_type = genomic DNA

SEQ ID NO: 1927 - DNA, 2349 bp, Triticum aestivum; identical to SEQ ID NO: 1922
  source 1..2349: mol_type = genomic DNA

SEQ ID NO: 1928 - DNA, 2328 bp, Triticum aestivum
  source 1..2328: mol_type = genomic DNA
atgtcgccaccccgcctccgcctgcacgcccgccactcctcctccgcctcgcaaccctcacgcagccagggctgggatccccacgccgcattcgccgccgccgcggagtgcgcacgctctggcaacctcaccccggaggacgcacacaacctgttcgaccaattgctgcagcatggcaatcctgtccaggagcgcgcactcaacagccttctcgccgccctcgcccgcacgccggcgtccgcggcgtgccgcgacggccctgccctcacggtcgccctcttcagccgcatatccaaaggacgggtggcgcagccaaatgtcttcacctatggcgtcctcatggcggactgctgctgccgtgcacaccgcccggatctgacactagcgttcttcggccgtttcctcaggacgggcctggaggcagaccaagtcgtcttcaacaccctcctcaagggcctttgccatgcaatgcgggcaggtgaggccgtgaacgtgcttcttcacaggatgcctgacctgggctgcactcccaatgtggtggcgtataacaccgtcatccatggcttctttagggaaggccaagcaggcaaggcatgcgatatgttccatggaatggcacagaagggcgttatgcctaatgtggtgacatataactcggttattgatgcactgtgcaaggccagggccatggacaaagcagagacggtccttagtcaaatggtaaatgatggtgtccgacctgataacgtgacatataatagtctcatccatggttattcctctttgggcaattggaaggaggcggttagggtattcagagagatgagtcagaggtttacaccagatgtcgttacctgcacctcactcatggccttcctttgcaagaatggaaaaagcaaagaagctgcagaaatttttgattcaatggccaccaagggcctgaaacgtgacaccgtttcatatgctattctccttcatgggtatgccaccgaaggatgcttggttgatatggataatctcttcaattcaatggtaagaggctgtattgtaccggactgtcatatcttcaacatactgattgatgcatatgctaaatctgagaagcttgataaggctatgcttatgtttaaagaaatgcagaaacatggagtgagtccaaatgcagtcacatatccaaccgtaatacatgcattttgcaaaatgggtagcttggacattgctatggacaaatttaaccagatggttgatatgggagtacgaccgaatgcaattgtttatcattccctaatccagggtttttgtacacatggggatttagtgaaagcaaaggaattggttactgaaatgaggaacaaagctatgcgtcctcctgatattaagttcttccattcaataatgcagaacctatgcacggaaggaagggtaatagaagcacgggatatcctcgacttgatgctgcacataggtatgaggcctgatgttcccatctttaatttactgatcggtggatactgcctagtccgtgagatggaggatgcaacaaaaatgtttgatgatatgatgtcatatggtttagaaccttgtaacaatacgtatggtatacttattaatggctattgcaaaaacggaaagattgatgatgggctgaatctgttcaaagagatgctgcacaagggacttaaacctacaacttttaattataacgtcatactggatggattatttctggctggacgaactgttgctgcaaaggtgaagtttaatgagatggttgaatctggagtaagtgtgtgcattgatacatactctatagttcttggtggactttgtagaaataattgcaccggtgaagcaatcacgctgtccaagaaattaagtacaatgaatgtcaaattcaatattgcaattgtcaatatcttgattggtccattcttcagggttcggcgaaaccaagaagctaaggatttgtttgccgcaataccatccaatggcttggtagctaatgttgttacctacagcataatgatgacaaatcttgtaaaagaagggtctgtggaagaagctgacactctctttttatcaatggagaagagcgggtgtactgccaactcttgtatgttaaatcatataatcagaaggttactggaaaaaggagagatagtcaaggctcgaaattatatgtcgaaagttgatgcaaagagctactcacttgaagctaaaactgtttcgctgctgatctccctcttttcagggaaagggaaatatagagaacgcaaaaaattgctccctatgaagtatcagtttctcgaagaagcagccacagttgaa

SEQ ID NO: 1929 - DNA, 969 bp, Triticum aestivum
  source 1..969: mol_type = genomic DNA
atgcttcctcctgatattgcattcttcaattcaatcatgcagaacctttgcacagaaggaagggtaatagaagcacgggatgtccttggcttgatagcgcacataggtatgaggcctgatgtttgcacatttaatatactgatcggtggatactgcctagtcggcaagatggaggatgcctcaaaaatatttgatgatatgatgtcatatggcttagaaccttctaatattacgtatggtatacttattaatggctattgcaaaaatagaaggattgatgacgggcttattctgttcaaagagatgctgcacaagggacttaaacctacaacttttaattataacgtcatactggatggattatttctggctggacgaactgttgctgcaaaggaaaagtttgatgagatggttgaatctggagtaagtgtgtgcattggtacatattcgatagttcttggtggactttgtagaaataattgtagtggcgaagcaatcacgctattccagaaattaagcacaatggatgtgaaattcaatattacaattgtcaatataatgattgatgccttctacagggttcagcgaaaccaagaagccaaggatttgtttgctgcagtatcagccaatggtttggtagctaatgtttttacctacaccataatgatgaaaaatcttataaaagaagggtcagtggaagaagctgacgatctctttttatcaatggagaagagcggctgtactgctgactcttatatgttaaatcttatcgtcagaatgttactggaaaaaggagagctagtcaaggctgggaattatatgtctaaagtagatgcaatgagctactcacttgaagctgaaaccgtttcgctgcttatctctctcttttcggggaaagggaaatatagagaacacataggattgctccctgcaaagtatcggtttcgtgaagaagcagccacagttgtg

SEQ ID NO: 1930 - DNA, 1989 bp, Triticum aestivum
  source 1..1989: mol_type = genomic DNA
atggactgttgctgccgcgcacaccgcctcgatctggcgttcgctttcttcggccgtctcctcaggacgggacttaaggcaggcgtcattcaagtttgcactcttctcaagggcctctgccgcgcaaagcgggctgatgaggctctcgacgtgctgcttcacaggatgcctgagctgggctgcactcccgatgtggtggcatataccacggtcatccacggcttctttaaggaaggccaagtaggcaaggcatgcaatctgttccatggaatggcgcagcagggcgttgcgcctaatttggtgacatataacttggttattgatgcgttgtgcaaggccaaagcaatggacaaggcagagtatttcctcggtcagatggttgatgatggtgtcgtacctgataatgtgacatataatagcctcatccatggatattcctcttcaggccactggaaggaggcagttagggtattcaaagagatgacaagtcggagggttacagcagatgtgcatacttacaacatgtttatgacctttctttgcaaacatggaagaagcaaagaagctgcaggaatttttgataccatggctatgaagggcctgaaacctgacaacgtttcatatgctattctccttcatgggtatgccaccgaaggaagcttagttgatatgattaatctcttcaattcaatggaaagagactgtattctacctgactgttgtatcttcaacatactgattaatgcatatgctaaatctgggaagcttgataaggctatgcttatcttcaatgaaatgcagaaacaaggagtgagtccaaatgcagtcacatattcaaccataatacatgcattttgcaaaaattgtaggttggacgatgctgtgataaagtttaatcagatgattgatacaggagtacgacagggcacagctgtttatcgttccctaatccagggtttttgtacacacggcgatttggtgaaagcaaaggaattgcttactgaaatgatgaacaaaggtatgcttcctcctgatattgcattcttcaattcaatcatgcagaacctttgcacagaaggaagggtaatagaagcacgggatgtccttggcttgatagcgcacataggtatgaggcctgatgtttgcacatttaatatactgatcggtggatactgcctagtcggcaagatggaggatgcctcaaaaatatttgatgatatgatgtcatatggcttagaaccttctaatattacgtatggtatacttattaatggctattgcaaaaatagaaggattgatgacgggcttattctgttcaaagagatgctgcacaagggacttaaacctaaaacttttaattataacgtcatactggatggattatttctggctggacgaactgttgctgcaaaggaaaagtttgatgagatggttgaatctggagtaagtgtgtgcattggtacatattcgatagttcttggtggactttgtagaaataattgtagtggcgaagcaatcacgctattccagaaattaagcacaatggatgtgaaattcaatattacaattgtcaatataatgattgatgccttctacagggttcagcgaaaccaagaagccaaggatttgtttgctgcagtatcagccaatggtttggtagctaatgtttttacctacaccataatgatgaaaaatcttataaaagaagggtcagtggaagaagctgacgatctctttttatcaatggagaagagcggctgtactgctgactcttatatgttaaatcttatcgtcagaatgttactggaaaaaggagggctagtcaaggctgggaattatatgtctaaagtagatgcaatgagctactcacttgaagctgaaaccgtttcgctgcttatctctctcttttcggggaaagggaaatatagagaacacataggattgctccctgcaaagtatcggtttcgtgaagaagcagccacagttgtg

SEQ ID NO: 1931 - DNA, 1032 bp, Triticum aestivum
  source 1..1032: mol_type = genomic DNA
atggactgttgctgccgcgcacaccgcctcgatctggcgttcgctttcttcggccgtctcctcaggacgggacttaaggcaggcgtcattcaagtttgcactcttctcaagggcctctgccgcgcaaagcgggctgatgaggctctcgacgtgctgcttcacaggatgcctgagctgggctgcactcccgatgtggtggcatataccacggtcatccacggcttctttaaggaaggccaagtacgcaaggcatgcaatctgttccatggaatggcgcagcagggcgttgcgcctaatttggtgacatataacttggttattgatgcgttgtgcaaggccaaagcaatggacaaggcagagtatttcctcggtcagatggttgatgatggtgtcgtacctgataatgtgacatataatagcctcatccatggatattcctcttcaggccactggaaggaggcagttagggtattcaaagagatgacaagtcggagggttacagcagatgtgcatacttacaacatgtttatgacctttctttgcaaacatggaagaagcaaagaagctgcaggaatttttgataccatggctatgaagggcctgaaacctgacaacgtttcatatgctattctccttcatgggtatgccaccgaaggaagcttagttgatatgattaatctcttcaattcaatggaaagagactgtattctacctgactgttgtatcttcaacatactgattaatgcatatgctaaatctgggaagcttgataaggctatgcttatcttcaatgaaatgcagaaacaaggagtgagtccaaatgcagtcacatattcaaccataatacatgcattttgcaaaaagggtaggttggacgatgctgtgataaagtttaatcagatgattgatacaggagtacgacagggcacagctgtttatcgttccctaatccagggtttttgtacacacggcgatttggtgaaagcaaaggaattgcttactgaaatgatgaacaaaaggtatgcttcctcc

SEQ ID NO: 1932 - DNA, 2364 bp, Triticum aestivum
  source 1..2364: mol_type = genomic DNA
atgcctcgcttctcctccaccacgccaatgtcgccaccccgcctcctcctccggctccgcgcccgccactcctcctccacctctcatccctcacgcatctgggatccccacgctgccttcgccgccgccacggaacgtgggcgctctggcaacctcaccccggaggacgcacaccacctgttcgacgaattgctctggcagggcaatcctgtccaggaccgccccttgaacaaacttctctccgccctcgcccgtgctccggcgtccgcggcctgcagaaacggccctgcactcgcggttgccctcttcagccgcatatcccaaggtgcccgccgacgggtggcggagccaacggcctgcacctacggcatcctcatggactgctgctgccgcgcacaccgcctggatctggcgctcgccttcttcgcccgtctcctcaagacgggcctggaggcaaaccaagtcatcttcaacaccctcctcaagggactctgccacgcaaagcgctcagatgaggctctggacgtgctgcttcacaggatgcctgagctgggctgcacccccggcgttgtggcgtataacacggtcatccatggcttcttcaaggaaggccaagtaggcaaggcgtgcaatctattccatgaaatggtgcagcagggtgttatgcctgatgtggtgacatataactcggttaccgatgcgctgtgcaaggccagaggaatggacaaggcagagtatttccttcgtcaaatggttgatgatggtgtcgtacctgatactgtgacttataatagcctcatccatggatactcctcttcaggccactggaaggaggcagttagggtattcaaagagatgacaagtcggagggttacaccagatgtgcatacttacaacatgtttataacctttctttggaaacatggaagaagcaaagaagctgcaggaatttttgattccatggctatgaagggcctgaaacctgacaacgtttcatatgctattctccttcatgggtatgccaccgaaggatgcttagttgatgtgattaatctcttcaattccatggcaacagactgtattctacctaactgtcatatcttcaacatactgattaatgcatatgctaaatctgggaagcttgataaggctatgcttatatttagagaaatgcagaaacaaggagtgagcccagatgcattcacatattcaaccttaatacatgcattttgtaaaaagggtcggttggacgatgctatgataaagtttaatcagatggttgatacaggagtacgacagggcacagctatttatggttctctaatccagggtttttgtacacacggcgatttggtgaaaggaaaggaattggttactgaaatgatgaacaaaggtatacctcctcctgatattatgttcttccattcaatcatgcagaacctatgcacagaaggaagggtaatagaagcacgggatatccttggcttgatagcgcacataggtatgaggcctaatgtttgcacatttactatactgatcggtgggtactgcctagtctgcaagatggaggatgcaacaaaaatgtttgaggatatggtgtcatttggtttagaaccttgtaatattacgtatggtatacttattaatggctattgcaaaaatagaaggattgatgatgggcttattctgttccaagagatgctgcacaagggacttaaacctacaacttttaattataatgtcatactggatgggttatttctggctggacgaactgttgctgcaaaggaaaagtttgatgagatggttgaatctggagtaagtgtgtgcactgatacatattcgatagttcttgctggactttgcagaaataattgctctagcgaagtaatcatgctgttccagaaattaagggcaatgaacatggaattcaatattagaattgtcactatcatgattgatgccttctacaaggttcggcgaaaccaagaagctaaggatttgtttgctgcaataccatccaatggcttggtagctaatgttgttacctacagcataatgatgaaaaatcttataaaagaaggttcagtggaagaagctgacactctctttttatcaatggagaagagcggctgtactgcaaccccttggatgttaaatcatattatcagaaggttactggaaagaggagagatagtcaaggctggaaattatatgtcgaaagttgatgcaaagagctactcacttgaagctaaaactgtttcgctgctgatctccctcttttcagggaaagggaagtatagagaacacataaaattgctccctatgaagtatcagtttctcgaagaagcagccacagttgaa

SEQ ID NO: 1933 - DNA, 2355 bp, Triticum aestivum
  source 1..2355: mol_type = genomic DNA
atgtcgccactccgcctccgcctccgcctccggccccgcctccatgcccgccactcctactccacctcgcatcccccacgcggccagggctgggatccccacgcctccttcgcagctgccacggagcgcgcgcgatctggcaacctctcctcggaggacgcacaccacctgttcgaccaattgctcctgcaggctaatccggtcaacatgcgccttccgaacgaccttctcaccgccctggctcgcgcacctgcgtccgcatcctgcagcaacggccccgccctcgccgtcgccctcttcagccgtttgtcccaaggtgcccgccaacgggtggtgcagccaacggcctgcacctacggcatcctcatggactgctgctgccgcgcaaaccgccaggatctggcgctcgccttcttcgcccgtctcctcaggacgggactcaaggcaggcgtcatagaagtcaacactcttctcaagggactctgccgtgcaaagcgggctgatgaggctctggacattctgcttcacaggatgcctgagctaggctgcacccccaacgtggtggcatataacacggtcatccatggcttcttccaagaaggccaagcaggcaaggcgtgcagcttgttccatgaaatggcgcagcagggcgttgcgcctagtttggtgacatataactcggttattgatgcgctgtgcaaggccagagccatggacaaggcagagtatttccttggtcagatggttgatgatggtgtcatacctgataatgtgacatataatagcctcatccatggatattcctcttcaggccactggaaggaggcagttagggtattcaaagagatgacaagtcggagggttaaaccaaatgtgcatactcacaacatgtttatgacctttctttgcaaacatggaagaagcaaagaagctgcaggaatttttgataccatggctatgaagggcctgaaacataacaacgtttcatatgctattctccttcacgggtatgccaccgaaggatgcttagttgatatgattaatctcttcaattcaatggaaagatactgcattctacctgactgtcgtatcttcaacatactgattcatgcacatgctaaatctgggaagcttgataaggccatgcttatcttcaatgaaatgcagaaacaaggagtgagtccaaatgcagtcacatattcaaccataatacatgcattttgcaaaaagggtaggttggacgatgctgtgataaagtttaatcagatgattgatacaggagtacgacagggcacagctgtttatcgttccctaatccagggtttttgtacacacggcgattcggtgaaagcaaaggaattgctcactgaaatgatgaacaaaggtatgcttcctcctgatattgcattcttcaattcaatcatgcagaacctttgcacagaaggaagggtaatagaagcacgggatgtccttggcttgatagcgcacataggtatgaggcctgatgtttgcacatttaatatactgatcggtggatactgcctagtcggcaagatggaacatgcctcaaaaatatttgatgatatgatgtcatatggcttagaaccttctaatattacgtatggtatacttattaatggctattgcaaaaatagaaggattgatgacgggcttattctgttcaaagagatgctgcacaagggacttaaacctacaacttttaattataacgtcatactggatggattatttctggctggacgaactgttgctgcaaaggaaaagtttgatgagatggttgaatctggagtaagtgtgtgcattggtacatattcgatagttcttggtggactttgtagaaataattgtagcggcgaagcaatcacgctattccagaaattaagcacaatggatgtgaaattcaatattataattgtcaatataatgattgatgctttctacaaggttcagcgaaaccaagaagccaaggatttgtttgctgcagtatcagccaatggtttggtagctaatgtctttacctacaccataatgatgaaaaatcttataaaagaagggtcagtggaagaagctgacgatctctttttatcaatggagaagagcggctgtactgctgactcttatatgttaaatcttatcgtcagaatgttactgggaaaaggagagatagtcaaggctgggaattatatatctaaaattgatgcaaagagctactcacttgaagctaaaactgtttcgctgcttatctctctcttttcagggaaagggaaatatagagaacacataggattgctccctgcaaagtatcggtttcgtgaagaagcagctacagttgtg

SEQ ID NO: 1934 - DNA, 984 bp, Triticum aestivum
  source 1..984: mol_type = genomic DNA
atgatgaagaaaggyatgcttcctcctgatattaarttcttcmattcaatcatgcagaacctttgcacagaaggaagggtaatagaagcacgggatgtccttggcttgatagcgcacataggtatgaggcctgatgtttgcacatttaatatactgatcggtggatactgcctagtcggcaagatggarsatgcctcaaaaatatttgatgatatgatgtcatatggcttagaaccttctaatattacgtatggtatacttattaatggctattgcaaaaatagaaggattgatgacgggcttattctgttcaaagagatgctgcacaagggacttaaacctacaacttttaattataacgtcatactggatggattatttctggctggacgaactgttgctgcaaaggaaaagtttgatgagatggttgaatctggagtaagtgtgtgcattggtacatattcgacagttcttggtggactttgtagaaataattgtagcggcgaagcaatcacgctattccagaaattaagcacaatggatgtgaaattcaatattataattgtcaatataatgattgatgctttctacaaggttcagcgaaaccaagaagccaaggatttgtttgctgcagtatcagccaatggtttggtagctaatgtctttacctacaccataatgatgaaaaatcttataaaagaagggtcagtggaagaagctgacgatctctttttatcaatggagaagagcggctgtactgctgactcttatatgttaaatcttatcgtcagaatgttactgggaaaaggagagatagtcaaggctgggaattatatatctaaaattgatgcaaagagctactcacttgaagctaaaactgtttcgctgcttatctctctcttttcagggaaagggaaatatagagaacacataggattgctccctgcaaagtatcggtttcgtgaagaagcagccacagttgtg

SEQ ID NO: 1935 - DNA, 2355 bp, Triticum aestivum; identical to SEQ ID NO: 1933
  source 1..2355: mol_type = genomic DNA

SEQ ID NO: 1936 - DNA, 2376 bp, Triticum aestivum
  source 1..2376: mol_type = genomic DNA
atgccccgcttctcctccaccacgccaatgtcgccaccccgcctcctcctccgactccgcgcccgccactcctcctccacctctcatccctcacgcatctgggatccccacgccgccttcgccgctgcgacgcagcgggcgcgctctggcacgctcaccacggaggacgcacaccacctgttcgacgaattgctgcggcagggcaatcctgtccaggagcgtcccttgaataactttctggctgccctcgcccgcgcgcccgcgtccgcatcctgcagcggtggccccgccctggccgttgccctcttcggccatttgtcccgaggcgccggacgacgggtggcgcagccaaatgtcttcacctatggcgtcctcatggactgctgctgccgtgcgtgccgcccggatctggcgctcgccttcttcggccgtctcctcaagacgggcctggaggcagaccaagtcgtcttcagcaccctcctgaagggcctttgccacgcaaagcgggcggatgaggctctggacgtgctgcttcacaggatgactgagctgggctgcacccccaacgtggtggcgtataacacggtcatccatggcttctttagggaaggccaagtaggcaaggcgtgcgctctgttccatggaatggcgcagcagggcgttacacctgatgtggtgacatataactcggttattgatccgctgtgcaaggccaaagcaatggacaaggcagagtatttcctttgtcagatggttgataatggtgccgtacctaataatgtgacatataatagcctcatccatggatattcctcttcaggccattcaaaggaggcggtcagggtgctgaaagagatgacaagtaagggtatcataccagatgtttttacttgcaactcgctcatggcctccctttgcaagaatggaagaagcaaagaagctgcagaaatatttgattcaatgtccatgaagggcctgaaacctaacaccgtttcatatgctattcgccttcatgggtatgccaccgaaggatgcttaattgatatgattaatctcttcaattcaatggaaagagactgtattctacctgactgtcatatcttcagcatactgattaatgcatatgctaaatctgggaagcttgataaggctatgcttatattcaaaaaaatgcggaaacaaggagtgagtccaaatgcagtcacatattcaaccgtaatagatgcattttgtaaaaagggtcggttggatgatgctgtgatagagtttaatcagatgattgatacaggagtacgaccgaacacggctgtttattgttccctaatccagggtttctgtacacatggcggtttggtgaaagcaaaggaatatgttactgaaatgatgaacaaaggtatgcttcctcctgatattatgttcttccattcagtaatgcagaacctatgcacagaaggaagggtaatagaagcacgggatatccttggcttgatagcgcacataggtatgacgcctgatgcttgcacatttaatatactgattggtggatactgcctagtctgcaagatggaggattcaacaaacatgtttaatgatatggtgtcatatggtttagaaccttgtaacattacgtatggtatacttattaatggctattgcaaaaatagaaggattgatgaggggctgattctgttcaaagagatgttgcgcaagggacttaaacctacaacttttaattataacgtcatcttggatggattatttctggctggacgaactgttgccgcaaaggaaaagtttaatgagatggttgaatctggagtaagtatgtggatcagtacttactctatagttcttcgtggactttgtagaaataattgtagcggcgaagccatcacgctattccagaaattaagcgcaatggatgtgaaattcaatattagaattgtcaatatcatgattgatgccttcttcagggttcagcgaaagcaagaagctaaggatttgtttgctgcaataacagccaatgggttggttgctgatgtttttacctacagcctaatgatgacaaatcttataaaagaagggtcagtggaagaggctgacacactctttttatcgatggagatgagcggctgtacttcgaactcgtggatgttaaatcttattatcagaaggttgctggaaaaaggagagatagtcaaggctggatgttatatgtctaaagttgatgcgaagagcttctcacttgaagctaaaactgtttcactgctgatctctctcttttcagggaaagggaaatacagagaacacataagattgctacctacaaagtatcagtttctcgaagaagcagccacagttgaatggtttgctaca

SEQ ID NO: 1937 - DNA, 2376 bp, Triticum aestivum; identical to SEQ ID NO: 1936
  source 1..2376: mol_type = genomic DNA

SEQ ID NO: 1938 - DNA, 2376 bp, Triticum aestivum; identical to SEQ ID NO: 1936
  source 1..2376: mol_type = genomic DNA

SEQ ID NO: 1939 - DNA, 2376 bp, Triticum aestivum; identical to SEQ ID NO: 1936
  source 1..2376: mol_type = genomic DNA

SEQ ID NO: 1940 - DNA, 2376 bp, Triticum aestivum; identical to SEQ ID NO: 1936
  source 1..2376: mol_type = genomic DNA

SEQ ID NO: 1941 - DNA, 2376 bp, Triticum aestivum; identical to SEQ ID NO: 1936
  source 1..2376: mol_type = genomic DNA

SEQ ID NO: 1942 - DNA, 2313 bp, Triticum aestivum
  source 1..2313: mol_type = genomic DNA
atgccaaccgcccgcctgtcctccatcttcacctcctccttcagggatccttcacgagcccccctcgccgccttggctgccgccacggaacgcgtgcgcgctggaacgctaacccgggaggacgcgcaccacctgttcggcgaattgctaggccaagccgccgccgtcccggaacgcgggttgaacaactttcttgccacactcgcccgtgctccaccctcacctgcctgcagcgatggccccggccttgccatcgccctcttcaaccgcatgtcccgaggcgctggtgcacgggtggtgtcgcccacgctctgtacctattccatcctcatggactgctgctgccgcgcaggccgcccggacttggtggttgccttcttcggtcgcctcatcaggttggggctgcgcttggaggtcatctccgtcagcaatctcctcaaggggctctgccaggccaagcgtacaaatgaggcggtggccttgctgctccacgggacacctgaactggactgtgtgcctaatgtcttctcgtacagcatcgtaatcaacggctgttttaaagaaggtgaagtagacaaagcgtgcaatctcttccatgggatgatccaactgggagttcaacctaatgtggtcatctacacctcaattatcgatgcactaagcaagtgcagagccatggacaaggcagaagtggtccttcagcaaatggttgatcaaggcattgaacccaacatcaggacatatactaccctgatacatggatattccgcttcgggtcagtggaaggcggcagttagagtattcaaggaaatggcaagtgttggtgttctaccaaatgctgtcactttgaactcatttatggattcactttgcaagcatagaaggacaaaggaagctagagttatttttgactccatggctgcaaagggccaaaaacctgatgtcgtctcctactctactatgcttagcgggtatgcgaaagaaggatgcttcgatgatatgacttgtctcttcaattcgatgctacagaatggtgttgtacctaaccaccatattttcaacatactgatcaatgcatatgctaaacgtggactgatggatgcggctatgcacatgttcgaagtaatgaggcaacaaggagtaaacccagatgtatttagctatcaaattgtaatggattcactttgcaaaatgggtaggatggatgctgctctggacaaatttaatcagatggtcaatcaaggagtttcacctgacatagttgtttaccgatgcctagttctgggttcttgctctcatggtgattttgagaaagccaaggaattgatttctgaagcagttaatagaggtctgtgttctaacagtgtgttcttctatcctgtaataaacgacctgtgcaaagaaggaaaggtgaaggaggcacaggatatgtttgacttcattgtaggtattggtcagcggcctgatgtgattatgtacaattcactgatggatggatattgccttgttggcaaagtggaggaagcactgagagtacttgatgctatgaagtctgttggcctccaacctgatgcttttacgtacggtatacttcttaatggctactgtaaaattggcaagatcgccgatggattgagtcttttcagggaaatgtcactcaacggggttaagcccatgactattatgtacaacattatactccatgggttgtttttctccgggagaacagtttctgcaaaggaaatattccatacgatgaatgcaagtggcataccagtgggcgttgacacatacaacatagttcttagtggactttgtaaaaataattgcactgatgaagcaatagagctgttcaagaaattacgtgctatgaacgtgaagattaatgtcataatactcaataccatgatttctgcaatgtttaaaactaggagaattgaagaagccaaggatttgtttgctactatatcagccattgggttggtgccttctgttgtgacttacagtgtaatgatgacgaatttcataaaagaagggttgttggcagaggctgatgatatgtttttagcaatggagaaggctagctgtgctcccaactccagtctgctaaatcaagtggtcagggcgttgctggaaaaaggtgcagttgtaaaggctgcaacttatctcgctaaacttgatgctaaacagctgtcagttgaagcttcaacgatttcgttaatagtatctctcttctcaggggaagggaaactaagggagcacgtagagttgcttccagtaaagtaccagcctcctgagagttcggctgacaat

SEQ ID NO: 1943 - DNA, 2313 bp, Triticum aestivum; identical to SEQ ID NO: 1942
  source 1..2313: mol_type = genomic DNA

SEQ ID NO: 1944 - DNA, 1002 bp, Triticum aestivum
  source 1..1002: mol_type = genomic DNA
atgccaaccgcccgcctgtcctccatcttcacctcctccttcagggatccttcacgagcccccctcgccgccttggctgccgccacggaacgcgtgcgcgctggaacgctaacccgggaggacgcgcaccacctgttcggcgaattgctaggccaagccgccgccgtcccggaacgcgggttgaacaactttcttgccacactcgcccgtgctccaccctcacctgcctgcagcgatggccccggccttgccatcgccctcttcaaccgcatgtcccgaggcgctggtgcacgggtggtgtcgcccacgctctgtacctattccatcctcatggactgctgctgccgcgcaggccgccaggacttggtggttgccttcttcggtcgcctcatcaggttggggctgcgcttggaggtcatctccttcagcaatctcctcaaggggctctgccaggccaagcgtacaaatgaggcggtggccttgctgctccacgggacacctgaactggactgtgtgcctaatgtcttctcgtacaacatcataatcaacggctgttttaaagaaggtgaagtagacaaagcgtgcaatctcttccatgggatgatccaactgggagttcaacctaatgtggtcatctacacctcaattatcgatgcactaagcaagtgcagagccatggacaaggcagaagtggtccttcagcaaatggttgatcaaggcattgaacccaacatcaggacatatactaccttgatacatggatattccgcttcgggtcagtggaaggcggcagttagagtattcaaggaaatggcaagtgttggtgttctaccaaatgctgtcactttgaactcatttatggattcactttgcaagcatatagaaggacaaaggaagctagagttatttttgactccatggctgcaaagggccaaaaacctgatgtcgtctcctactctactatgcttagcgggtatgcgaaagaaggatgcttcgatgata

SEQ ID NO: 1945 - DNA, 2313 bp, Triticum aestivum; identical to SEQ ID NO: 1942
  source 1..2313: mol_type = genomic DNA

SEQ ID NO: 1946 - DNA, 1083 bp, Triticum aestivum
  source 1..1083: mol_type = genomic DNA
atggtcaatcaaggagtttcacctgacatagttgtttaccgatgcctagttctgggttcttgctctcatggtgattttgagaaagccaaggaattgatttctgaagcagttaatagaggtctgtgttctaacagtgtgttcttctatcctgtaataaacgacctgtgcaaagaaggaaaggtgaaggaggcacaggatatgtttgacttcattgtaggtattggtcagcggcctgatgtgattatgtacaattcactgatggatggatattgccttgttggcaaagtggaggaagcactgagagtacttgatgctatgaagtctgctggcctccaacctgatgcttttacgtacggtatacttcttaatggctactgtaaaattggcaagatcgccgatggattgagtcttttcagggaaatgtcactcaacggggttaagcccacgactattatgtacaacattatactccatgggttgtttttctccgggagaacagtttctgcaaaggaaatattccatacgatgaatgcaagtggcataccagtgggcgttgacacatacaacatagttcttagtggactttgtaaaaataattgcactgatgaagcaatagagctgttcaagaaattacgtgctatgaacgtgaagattaatgtcatagtactcaataccatgatttctgcaatgtttaaaactaggagaattgaagaagccaaggatttgtttgctactatatcagccattgggttggtgccttctgttgtgacttacagtgtaatgatgacgaatttcataaaagaagggttgttggcagaggctgatgatatgtttttagcaatggagaaggctagctgtgctcccaactccagtctgctaaatcaagtggtcagggcgttgctggaaaaaggtgcagttgtaaaggctgcaacttatctcgctaaacttgatgctaaacagctgtcagttgaagcttcaacgatttcgttaatagtatctctcttctcaggggaagggaaactaagggagcacgtagagttgcttccagtaaagtaccagcctcctgagagttcggctgacaat

SEQ ID NO: 1947 - DNA, 2313 bp, Triticum aestivum; identical to SEQ ID NO: 1942
  source 1..2313: mol_type = genomic DNA

SEQ ID NO: 1948 - DNA, 2313 bp, Triticum aestivum
  source 1..2313: mol_type = genomic DNA
atgccaaccgcccgcctgtcctccatcttcacctcctccttcagggatccttcacgagcccccctcgccgccttggctgccgccacggaacgcgtgcgcgctggaacgctaacccgggaggacgcgcaccacctgttcggcgaattgctaggccaagccgccgccgtcccggaacgcgggttgaacaactttcttgccacactcgcccgtgctccaccctcacctgcctgcagcgatggccccggccttgccatcgccctcttcaaccgcatgtcccgaggcgctggtgcacgggtggtgtcgcccacgctctgtacctattccatcctcatggactgctgctgccgcgcaggccgcccggacttggtggttgccttcttcggtcgcctcatcaggttggggctgcgcttggaggtcatctccgtcagcaatctcctcaaggggctctgccaggccaagcgtacaaatgaggcggtggccttgctgctccacgggacacctgaactggactgtgtgcctaatgtcttctcgtacagcatcgtaatcaacggctgttttaaagaaggtgaagtagacaaagcgtgcaatctcttccatgggatgatccaactgggagttcaacctaatgtggtcatctacacctcaattatcgatgcactaagcaagtgcagagccatggacaaggcagaagtggtccttcagcaaatggttgatcaaggcattgaacccaacatcaggacatatactaccctgatacatggatattccgcttcgggtcagtggaaggcggcagttagagtattcaaggaaatggcaagtgttggtgttctaccaaatgctgtcactttgaactcatttatggattcactttgcaagcatagaaggacaaaggaagctagagttatttttgactccatggctgcaaagggccaaaaacctgatgtcgtctcctactctactatgcttagcgggtatgcgaaagaaggatgcttcgatgatatgacttgtctcttcaattcgatgctacagaatggtgttgtacctaaccaccatattttcaacatactgatcaatgcatatgctaaacgtggactgatggatgcggctatgcacatgttcgaagtaatgaggcaacaaggagtaaacccagatgtatttagctatcaaattgtaatggattcactttgcaaaatgggtaggatggatgctgctctggacaaatttaatcagatggtcaatcaaggagtttcacctgacatagttgtttaccgatgcctagttctgggttcttgctctcatggtgattttgagaaagccaaggaattgatttctgaagcagttaatagaggtctgtgttctaacagtgtgttcttctatcctgtaataaacgacctgtgcaaagaaggaaaggtgaaggaggcacaggatatgtttgacttcattgtaggtattggtcagcggcctgatgtgattatgtacaattcactgatggatggatattgccttgttggcaaagtggaggaagcactgagaatacttgatgctatgaagtctgttggcctccaacctgatgcttttacgtacggtatacttcttaatggctactgtaaaattggcaagatcgccgatggattgagtcttttcagggaaatgtcactcaacggggttaagcccatgactattatgtacaacattatactccatgggttgtttttctccgggagaacagtttctgcaaaggaaatattccatacgatgaatgcaagtggcataccagtgggcgttgacacatacaacatagttcttagtggactttgtaaaaataattgcactgatgaagcaatagagctgttcaagaaattacgtgctatgaacgtgaagattaatgtcataatactcaataccatgatttctgcaatgtttaaaactaggagaattgaagaagccaaggatttgtttgctactatatcagccattgggttggtgccttctgttgtgacttacagtgtaatgatgacgaatttcataaaagaagggttgttggcagaggctgatgatatgtttttagcaatggagaaggctagctgtgctcccaactccagtctgctaaatcaagtggtcagggcgttgctggaaaaaggtgcagttgtaaaggctgcaacttatctcgctaaacttgatgctaaacagctgtcagttgaagcttcaacgatttcgttaatagtatctctcttctcaggggaagggaaactaagggagcacgtagagttgcttccagtaaagtaccagcctcctgagagttcggctgacaat

SEQ ID NO: 1949 - DNA, 2313 bp, Triticum aestivum; identical to SEQ ID NO: 1942
  source 1..2313: mol_type = genomic DNA

SEQ ID NO: 1950 - DNA, 2262 bp, Triticum aestivum
  source 1..2262: mol_type = genomic DNA
atgcctcgcttctcctccaccccgccaatgtcgccacgccgcctccgcgtcggactcggcgcccgccactcctcctccacctcccatccctcacgcagctgggagccccacgccgccttcgccgccgccacggagcgtgcgcgatctggcaacctcaccccggaggacgcacaccaccggttcgacgaattgctccggcaggccaatcctgtccaggagcgccccttgaacaaacgtctctccgccctcgccggtgctccggcgtccgcggcctgcagaaacggccctgcactcgcggtcgccctcttcagccgcatatcccaaggtgcccgccgacgtgtggcgcacccaacggcctgcacctacggcatcctcatggactgctgctgccgcgcacaccgcctcgatctggcgttcgctttcttcggccgtctcctcaggacgggacttaaggcaggcgtcattcaagtttgcactcttctcaagggcctctgccgcgcaaagcgggctgatgaggctctcgacgtgctgcttcacaggatgcctgagctggggggctgcacccccaacgtggtggcgtataccacggtcatccacagcttctttaaggaaggccaagtaagcaaggcatgcaatctattccatgaaatggcgctgcagggcgttacacctgatgtggtgacatatagctcggttattgatgcgctgtgcaaggccagagccatggacaaggcagagtatttccttcgtcagatggttcataatggtgtcctacctaataatgtgacatataatagcctcatccatggatattcctcttcaggccattggaaggaggcggttagggtgctgaaagaaatgacaagtcaaggtatcatacctgatatcatttcataccgtattctgcttcatgggtatgccaccgaagggtgcttagttgatatgattaatctcttcaattcaatggcaagatactgtattctacctgattgtcatatcttcaacatactgattaatgcatatgctaaatctgggaagcttgataaggctatgcttatatttaaagaaatgcagaaacaaggagtgagtccagatgcagtcacatattcaaccgtaatacatgcattttgcaaaaatggcaggttggacgatgctgtgataaagtttaatcaaatgattgatacaggagtacaaccgaacacatctgtttataatgccctaatccaggggttttctacaaatggcgatttggtgaaggcaaaggaattggttacggaaatgatgaacaaaggtatgcatcctcctgatattaaggtcttccattcggtaatgcagaacctatgcacagaaggaagggtaacagaagcacgggatatccttgacttgatagtgcacataggtatgaggcctgatgttttcacatttacttcactgagcggtggatactgcctagtccgcaacatggaggatgcatcaaaaatatttgatgatatggtgtcatatggtttagaaccttctaacatcacgtatggtatacttattaatggctattgcaaaaacaaaaggattgatgaggggctgattctgttcaaagaaatgttgcgcaagggacttaaacctacaactattaattacaatgtcatattggatggattatttctggctggacgaactgttgctgcaaaggaaaagtttaatgagatggttgaatctggagtaagtgtgtgcattgatacatattcgatagttcttggtggactttgcacaaataactgttgcggcgaagccatcacgctattccagaaattaagcaaaatgaatgtgaaattcaatattagaattgtcaatatcatgattgatgccttcttcaaggttcagcgaaagcaagaagctgaggatttgtttgctgcaatatcagcaaatgggttggttgctaatgtttttacctacagcctaatgatgacaaatcttataaaagaagggtcagcggaagaagctgacactctctttttatcgatggagaagagcggctgtactgccaactcgtggatgttaaatcttattatcagaaggctactggaaaaaggagagatagtgaaggctggaaattatatggctaaagtcgatgcaaagagctactcacttgaagctaaaactgtttcgctgctgatttctctcttttcagggaaagggaaatacagagaacacataagattgctgcctacaaagtatcagtttcgtgaagaagcagccatagttgaa

SEQ ID NO: 1951 - DNA, 2370 bp, Triticum aestivum
  source 1..2370: mol_type = genomic DNA
atgatctcccactcgtcgtcttcccagagttcacgacctactcactgtaaaaaacaatgctactgtacccgtcgtctcccactcgtcttgctcccacttcacaccaaggccatgcctcgcctctcctccaccacgcccatgtcgccactccgcctccgcctccgcctccgcgcccgccactccgcctccacctcccattcctcacgcagctgggagccccacgccgccttcgccgccgccacggagcgtgcgcgctctggcaaactcaccccggaggacgcacaccacctgttcgacgaattgctgcggcaggccaaacctgtccaggagcgcccccttaacaaccttcttgccgccctagctcgtgctccggcgtccgcggcgtgcagcgatggccctgcactcgcagtcaacctcttcggccgcatatcccaaggcgcctgccgacgtgtggcgcacccaacggcctgcacctacggcatcctcatggactgctgctgccgtgcacaccgcctcgatctggcgttcgctttcttcggccgtctcctcaggacgggacttaaggcaggcgtcattcaagtttgcactcttctcaagggcctctgccgcgcaaagcgggctgatgaggctctggacatgctgcttcacaggatgcctgagctgggctgcacccccaacgtggtggcatataccacggtcatccacggcttctttaaggaaggccaagtaagcaaggcatgcaatctattccatgaaatggcgctgcagggcgttacacctgatgtggtgacatatagctcggttattgatgcactgtgcaaggccagagccatggacaaggcagagtatttccttcgtcagatggttcataatggtgtcctacctaataatgtgacatataatagcctcatccatggatattcctcttcaggccattggaaggaggccgttagggtgctgaaagaaatgacaagtcaaggtatcatacctgatatcgtttcataccgtattctgcttcatgggtatgccaccgaagggtgcttagttgatatgattaatctcttcaattcaatggcaagatactgtattctacctgattgtcatatcttcaacatactgattaatgcatatgctaaatctgggaagcttgataaggctatgcttatatttaaagaaatgcagaaacaaggagtgagtccagatgcagtcacatattcaaccgtaatacatgcattttgcaaaaagggtaggttggatgatgctgtgataaagtttaatcaaatgattgatacaggagtacaaccgaaaacatctgtttataatgccctaatccaggggttttctacaaatggcgatttggtgaaggcaaaggaattggttatggaaatgatgaacaaaggtatgcatcctcctgatattaaggtcttccattcggtaatgcagaacctatgcacagaaggaagggtaacagaagcacgggatatccttgacttgatagtgcacataggtatgaggcctgatgttttcacatttactttactgatcggtggatactgcctagtccgcaacatggaggatgcatcaaaaatatttgatgatatggtgtcatatggtttagaaccttctaacatcacgtatggtatacttattaatggctattgcaaaaacaaaaggattgatgaggggctgattctgttcaaagaaatgttgcgcaagggacttaaacctacaactattaattacaatgtcatattggatggattatttctggctggacgaactgttgctgcaaaggaaaagtttaatgagatggttgaatctggagtaagcgtgtgcattgatacatattcgatagttcttggtggactttgcacaaataactgttgcggcgaagccatcacgctattccagaaattaagcaaaatgaatgtgaaattcaatattagaattgtcaatatcatgattgatgccttcttcaaggttcagcgaaagcaagaagctgaggatttgtttgctgcaatatcagcaaatgggttggttgctaatgtttttacctacagcctaatgatgacaaatcttataaaagaagggtcagcggaagaagctgacactctctttttatcgatggagaagagcggctgtactgccaactcgtggatgttaaatcttattatcagaaggctactgaaaaaaggagagatagtgaaggctggaaattatatggctaaagtcgatgcaaagagctactcacttgaagctaaaactgtttcgctgctgatttctctcttttcagggaaagggaaatacagagaacacataagattgctgcctacaaagtatcagtttcgtgaagaagcagccatagttgaa

SEQ ID NO: 1952 - DNA, 1290 bp, Triticum aestivum
  source 1..1290: mol_type = genomic DNA
atgaaaagcaacggtattgcagccgactgccgtgttttcaccatattaattgatgcatatgctaaacgcggaatgatggatgatgcaatgcacatatttgcggaaatgcgggaaaaaggagtgagtcccaatgtagtcacctatgccactgtaataggcgcactttgcagattgggtaggctggccgatgctatggacaggttcaatgagatgactgatatgggtgtacagccgaacacagctgtttatcactccctaattcagggtttttgtatgcatggtgatttgggtaaagccaaggagttagtttctgacatgataagcaaaggtattcctcgtcccaacattgtgttcttcaattcagttataaactatttgtgcaaagaaggaaggattatggatgcacaagatatctttgaattggttataatcatagatgggaagcctgatgtcattacatttaactcactgattgacggacattgcttagtcagcaagatggataaagcatttggagtacttggtgccatgttgtcagctggcattgagcctaatgttgttacatataatacacttgttaatggctattctagaaatggaaggatcgatgatggtttgactctgttcagacaaatgccacgtaagagaataaaacctgacagtgccacatatgggatcatactggatgggttgtttcgtgctgggagaactgttgctgcaaggaaaatgttccatgatatgatcgaaagcggaataacagtgagcatttccacatacaatattatacttgcaggtctttctagaaacaattgtgcagaagaagcgatcgacctgtaccagaaattagttgcaatgaatgtgaagttcaatatttcaataatcaataccatgatcaatgcaatgtacaaggttaaaagaaaagaggaagctaaagatttgtttgctgctatatcagcgagtgggttggttcctaatgcttcgacttatggagtaatgataataaatattctaaaagatggagcagtggaagatgctaacaatatgttctcagcaatggacaggaatggtatagctccctgctctcgtcttatagatagtattatcagaattttgctggaaaaaggtgagatcaccatggccggactttatttgttgaaacttgacgggaagaacatgctacttgaagcttcaactacttcactgatgttgtctctcttttcaaggaaagggaaatataaggaggatgtgaaatttctccctgcaaagtatcagttttttgatggatttggt

SEQ ID NO: 1953 - DNA, 1290 bp, Triticum aestivum; identical to SEQ ID NO: 1952
  source 1..1290: mol_type = genomic DNA

SEQ ID NO: 1954 - DNA, 2340 bp, Triticum aestivum
  source 1..2340: mol_type = genomic DNA
atgtcccgcctccgcctccgccgctcctccaccacgccgatgttccacatcctccgccgcagctcctcctctacctccatctcgcccccctcacgttcctggtctcccgaaggcgcctttgccgcggccacggcgcgtctcagcactggaacgctcagccctgaagaagcacaccacctgttcgacgaattgctgcggcaggccaccccggtccccagccgctccctgaacggcttccttgccacccttgcccgtgcgcctgcctccgcggcctgcagcagagatggccctgccctcgccctcgccctcgctctcttcaaccgcgtgtgcgcagaagaagccgacccgcgggtggcgcctctcacagtccacacctacggcatcctcatggactgctgctgccgcgcgcgtcgcccggacctggggcttgccttattcgcacgcttcctcaggacaggcctcaagacaaatgagatcatcgctaacaccttcctcaagtgcctctgctatgccaaacgtacagatgaggctatcaacttgctgcttcataggatgcccgagcttggctgcgtgcctgatgcaatctcatacaccattgttctgaagagcttatgcgagaatagcatgagtcagcgggcactcgacctgctccagatggtggcagaaggaggaggtgcctgctccctcaatgtggtggcgtatagcacagtcatccatggcttcttcaaggagggcgaaacaggcaaggcatgcaatctattccatgaaatgacccgtcaaggggttgtgcccaatgtggtcacgtatagctcgattattgatgcgttgtgcaagtccagagcaatggacaaggcagagctagtccttcaacagatggttgatagtggtgctcaaccgaataatgtgacatataattgcatgatccatggatattccacatcagggcagttgaaagaggctgctaaaatgtttagaaaaatgacaagccatggtcttgtaccaaatgcagtcacttgcagctcgttaatgacttccctttgcaagcatggaagaagcaaagaagcggcggaaatattttattccatgactgccaagggccacaaaccggatgccgtctcgtaccgtattttgcttcatgggtatgccaatgaaggatgctttgctgatatgattgatctctttaattcaatgaaaagcaacggtattgcagccgactgccgtgttttcaccatattaattgatgcatatgctaaacgcggaatgatggatgatgcaatgcacatatttgcggaaatgcgggaaaaaggagtgagtcccaatgtagtcacctatgccactgtaatagccgcactttgcagattgggtaggctggccgatgctatggacaggttcaatgagatgactgatatgggtgtacagccgaacacagctgtttatcactccctaattcagggtttttgtatgcatggtgatttgggtaaagccaaggagttagtttctgacatgataagcaaaggtattcctcgtcccaacattgtgttcttcaattcagttataaactatttgtgcaaagaaggaaggattatggatgcacaagatatctttgaattggttataatcatagatgggaagcctgatgtcattacatttaactcactgattgacggacattgcttagtcggcaagatggataaagcatttggagtacttgatgccatgttgtcagctggcattgagcctaatgttgttacatataatacacttgttaatggctattctagaaatggaaggatcgatgatggtttgactctgttcagacaaatgccacgtaagagaataaaacctgacagtgccacatatgggatcatactggatgggttgtttcgtgctgggagaactgttgctgcaaggaaaatgttccatgatatgatcgaaagcggaataacagtgagcatttccacatacaatattatacttgcaggtctttctagaaacaattgtgcagaagaagcgatcgacctgtaccagaaattagttgcaatgaatgtgaagttcaatatttcaataatcaataccatgatcaatgcaatgtacaaggttaaaagaaaagaggaagctaaagatttgtttgctgctatatcagcgagtgggttggttcctaatgcttcgacttatggagtaatgataataaatattctaaaagatggagcagtggaagatgctaacaatatgttctcagcaatggacaggaatggtatagctccctgctctcgtcttataaatagtattatcagaattttgctcaaaaaggtgagatcaccatggccggactttatttgt

SEQ ID NO: 1955 - DNA, 2340 bp, Triticum aestivum; identical to SEQ ID NO: 1954
  source 1..2340: mol_type = genomic DNA

SEQ ID NO: 1956 - DNA, 2340 bp, Triticum aestivum; identical to SEQ ID NO: 1954
  source 1..2340: mol_type = genomic DNA

SEQ ID NO: 1957 - DNA, 1290 bp, Triticum aestivum
  source 1..1290: mol_type = genomic DNA
atgaaaagcaacggtattgcagccgactgccgtgttttcaccatattaattgatgcatatgctaaacgcggaatgatggatgatgcaatgcacatatttgcggaaatgcgggaaaaaggagtgagtcccaatgtagtcacctatgccactgtaataggcgcactttgcagattgggtaggctggccgatgctatggacaggttcaatgagatgactgatatgggtgtacagccgaacacagctgtttatcactccctaattcagggtttttgtatgcatggtgatttgggtaaagccaaggagttagtttctgacatgataagcaaaggtattcctcgtcccaacattgtgttcttcaattcagttataaactatttgtgcaaagaaggaaggattatggatgcacaagatatctttgaattggttataatcatagatgggaagcctgatgtcattacatttaactcactgattgacggacattgcttagtcagcaagatggataaagcatttggagtacttggtgccatgttgtcagctggcattgagcctaatgttgttacatataatacacttgttaatggctattgtagaaatggaaggatcgatgatggtttgactctgttcagacaaatgccacgtaagagaataaaacctgacagtgccacatatgggatcatactggatgggttgtttcgtgctgggagaactgttgctgcaaggaaaatgttccatgatatgatcgaaagcggaataacagtgagcatttccacatacaatattatacttgcaggtctttctagaaacaattgtgcagaagaagcgatcgacctgtaccagaaattagttgcaatgaatgtgaagttcaatatttcaataatcaataccatgatcaatgcaatgtacaaggttaaaagaaaagaggaagctaaagatttgtttgctgctatatcagcgagtgggttggttcctaatgcttcgacttatggagtaatgataataaatattctaaaagatggagcagtggaagatgctaacaatatgttctcagcaatggacaggaatggtatagctccctgctctcgtcttatagatagtattatcagaattttgctggaaaaaggtgagatcaccatggccggactttatttgttgaaacttgacgggaagaacatgctacttgaagcttcaactacttcactgatgttgtctctcttttcaaggaaagggaaatataaggaggatgtgaaatttctccctgcaaagtatcagttttttgatggatttggt

SEQ ID NO: 1958 - DNA, 2340 bp, Triticum aestivum
  source 1..2340: mol_type = genomic DNA
atgcagaccggccgcctgtcctccatcttcaccagcaacgcaacctcctccttcagggctccttcgccacaaccacgacccccccttgccgccttggctgccgccacagagcgtgcgcgcgccggaacgctaagaccggaggaggctcaccacctgttcgacgaattgctgagccaagccgcccctgtcccagaacgcgggctgaacaacttttttgctgcactcgcccgtgctccgccctcagctgcgtgcggcgatggccctgcccttgccatcgctctcttcaaccgcatgtcccgaggcgtgggtccatggatggcatcgcccgctggctgtacctattccatcctcatggactgttgctgccgcgcaggacgcccggacttggtggttgccttcttcggccgcctcctcaggttgggcctgcgcttggaggtcatctccttcaacaacctcctcaaggggctctgccatgcccagcgtacaaatgaggctttggacgtgctgctccaccgcacacccgaactagactgtgtgcctgacgtcttctcctacagcatagtaatcaacagctgctttaaagaaggtgaagtagacaaagcgtgcaatctcttccatgagatgatccaactgggagttcaacctgatgtggccatctacacctcaattatcgacgcactaagcaaggctggagccatggacaaggcagaagtggtccttcagcagatggttgatcaaggaattgaacccgatgtcatgacatatactagcctgatacatggatattccggttcgggtcagtggaaggcggcagttagagtattcaaggaaatggcaagtgctggtgttctaccaaatgccttcactttgaactcatttatggattcactttgcaagcatagaaggacaaaggaagctagagttatttttgactcaatggctgcaaagggccaaaaactaaatatcgtctcctactctattatgcttaacgggtatgcgaaagaaggatgctttgatgatatgactggtctcttgaatttgatgctacagaatggtgttgtacctaaccaccatattttcaacatactgatcaatgcatatgctaaacgtggactgatggatgaggctatgcacatgttcgaagtaatgaggcaacaaggagtaaacccggatgtagttgactatctagtaataatggattcactttgtaaaatgggtaggatggatgctgctctggacaaatttaatcagatggtcaatcaaggagtttcacctaacaaagctatttaccaatgcctggttctgggttcttgctctcatggtcattttgtgaaagccaaggaattgatttctgaagcaattaatagaggtctgttttctaacagtgtgttcttctatcctgtaataaacgacctgtgcaaagaaggaaaggtgaaggaggcacaggatatgtttgacttcattctaggtattggtcagcggcctgatgtgattatgtacaattcactgatggatggatattgccttgttggcaaggtggaggaagcagtgagagtacttgatgctatgaagtctgctggcctccaacctactgccgttacgtatgctatacttcttaatggctactgtaaaattggcaggatcgccgatggattgagtcttttcagggaaatgtcactcagcggggttaagcccacgactattatgtacaacattatacttgatgggctgtttcgctccgggagaacagtttctgcaaaggaaaaattccgtacgatgagcgaaagtggcataccagtgggcattggcacatacaacataattcttcatggattttgtagaagcaattgcactgatgaagcaatagagttgttcaagaaattatgtgcaatgaacgtgaagattgatgtcataacactcaataccatgatttctgtaatgtttaaaactaggagaattgaagaagccaaggatttgtttgctactatatcagccatcggattggtgccttctgttgtgacttacagtgtaatgatgacgaatttcataaaagaagggttgctggcagaggctgatgatatgtttttagcaatggagaaggctggctgtgctcctgactgcaggctgctaaatcatgtagtcagggtgttgctggaaaaaggtgcagttgtaaaggctgcaacttatctcgctaaacttgatgcgaaagagctgtcacttgaagcttcaacggtttcgttaatagtatctctcttctcaaggagaggcaaattaagggagcacgtaaaattgcttccagtaaagtaccagcctcctgagatattacttggaacttcctac

SEQ ID NO: 1959 - DNA, 2283 bp, Triticum aestivum
  source 1..2283: mol_type = genomic DNA
atgcctcgcttctcttccaccacgtcaatgtcgtcactccgcctccgcctccgcctccgcctgcacgcctgccactcctcctcggcctcgcaaccctcacgcagccagggatgggatccccacgccgccttcgccgtcgccacggagtgtgcgcgctccggcaacctcaccccggagggcgcacataacctgttcgacgaattgctgcggcagggcaatcctgtcctggggcgccccctcaacaaccttctcgccgccctcgcccgtgcgccggcgtccagctcctgcagagatggccctgcactcgcggtcgccctcttcagccgcatatcccaaggcgcccgcctaagggtggtgcacccaacggcctgcacctacagcatcctcatggactgctgctgccgcgcgcgccacctggatctggcactcgccttcttcggccgtctcctcaggactgggctgaaggcaggcgccatagaagtcaacattcttctcaagagcctctgccatgcaaagcgggcagatgaggccatggaagtgcttcttcacaggatgcctgagctgggttgcacccctgactcggtggcgtataacacggtcatccacgggttctttaaggaaggccaagtaggcagagcaatggacaaggcggagtatttccttcgtgaaatggttgataatggtgtcatacctaataatgtgacatataatagcctcatccatggatattcctcttcaggctatcagaaggaggcggttagggtgctgaaagaaatgacaagtcagggtatcataccagatgtttttacttgcaactcgctcatggcctccctttccaagaatggaagaagcaaagaagctgcagaaatttatgactccatggccatgaagggcctggaacctgatatcgtctcgtataatactcggcttcacgggtatgccaccgaaggatgcttagttgatatgactaatctctttaattcaatgactagagatggtattcggcctaactgtcacactttgaacatattgattaatgcatatgctaaatttggcatgatggatgaggctatgcttatatttaaaggaatgcggaaacagggagtgagtccagatgtagtcacctattcaaccgtaatacatgcattttgcaaaatgggtagcttggacattgctatggacaaatttaagcagatgactgatatgggagtacgaccgaatccaattgtttatcattccctaatccagggtttttgtacacatggggatttagtgaaagcaaaggagttggttactgaaatgaggaacaaaggtatgcgtcctcctgatattaaggtcttccatttggtgatgcagaacctatgcacggaaggaagggtaacaaaagcacgggatatccttgacttgatagtgcgcattggtatgaggcctgatgttttcatatttaatatactgatcggtggatactgcctagtccgcaagatggcagatgcatcaaaaatatttgatgatatggtgtcatatggtttagaaccttctaatattacatatggtatacttattaatggctattgcaaaaacaaaaggattgatgatgggctgattctattcaaaacaatgttgcacaagggacttaaacctacaacttttaattataacgtcatactggatggattatttctggctggacgaacagttgctgcaaaagagaagtttaatgagatggttgaatctggagtaagtgtgtgcattgatacatgctctatagttcttggtggactttgtaaaaataactgcagcagcgaagcgatcaccctgttacggaaattaagcacaatgaatgtgaaatttgatattacaattgtcaatatcattattggtgcattctacagggtcaagagaaaccaagaggctaaggatttgtttgctgctataccagccaatggcttggttcctaatgctgttacctacaccataatgatgacaaatcttataaaagaaggttcagtggaagaagccgacaatctttttttatcaatggagaagagcggctctactgcaaactcttggatgttaaatcatattatcagaaggttactggaaagaggagagatagtcaaggctggaaattatatgtctaaagttgatgtaaagagctactcacttgaagctaaaactgtttcactgctgatctctctgttttcaagggaagggaaatatagagaccacatcaaattgctccctacaaagtatcagtttctggaagaagcagccacagttgaa

SEQ ID NO: 1960 - DNA, 1089 bp, Triticum aestivum
  source 1..1089: mol_type = genomic DNA
atggttgatatgggagtacgaccgaatgcaattgtttatcattccctaatccggggtttttgtacacatggggatttagtgaaagcaaaggaattggttactgaaatgaggaacaaagctatgcgtcctcctcatattaagttcttccattcaataatgcagaacctatgcacggaaggaagggtaatagaagcacgggatatcctcgacttgatgctgcacataggtatgaggcctgatgttcccatctttaatttactaatcggtggatattgcctagtccgcgagatggaggatgcaacaaaaatgtttgatgatatggtgtcatatggtttagaaccttgtaacaatacgtatggtatacttattaatggctattgcaaaaatagaaggattgatgacgggcttattctattcaaagagatgctgcgcaagggacttaaacctacaacttttaattataacgtcatactggatggattatttctggctggacgaactgttgctgcaaaggtgaagtttaatgagatggttgaatctggagtaagtgtgtgcattgatacatactctatagttcttggtggactttgtagaaataattgcaccggtgaagcaatcacgctgtccaagaaattaagtacaatgaatgtcaaattcaatattgcaattgtcaatatcttgattggtgcattcttcagggttcggcgaaaccaagaagctaaggatttgtttgctgctataccagccaatggcttggttcctaatgctgttacctacaccataatgatgacaaatcttataaaagaaggttcagtggaagaagctgacactctctttttatcaatggagaagagcgggtgtactgccaactcttgtatgttaaatcatattatcagaaggttactggaaagaggagagatagtcaaggctggaaattatatgtcgaaagttgatgcaaagagctactcacttgaagctaaaactgtttcgctgctgatctccctcttgtcagggaaagggaaatatagagaacacataaaattgctccctatgaagtatcagtttctcgaagaagcagccacagttgaa

SEQ ID NO: 1961 - DNA, 2277 bp, Triticum aestivum
  source 1..2277: mol_type = genomic DNA
atgaatatccggactactagactacactacatccccactcgtcttgctccagagttcacggcctactcaccaaggcccatgcctggcttctcctatgccgcgtcaatgtcgccactccgcctccgcctgcacgcccgccactccgcctccgcctcgcaaccctcacgcagccagggatgggatccccacgccgccttggccgtcgccacggttgccctcttcagccgcatatcccaaggcgccctccgacgtgtggcacatccaacggcttgcacctacagcatcctcatggactgctgctgccgcgcacaccgccctgatatggcactcgccttcttcggtcgtctcctcaggacgggtctggaggcagaccaagtcgttttcagcaccctcctcaagggactctgccacgcaaagcgctcagatgaggctctggacgtgctgctgcacaggatgcctgagctcggctgcaccacccacgtggtggcgtataacaccgtcatccatggcttctttagggaaggccaagtaggcaaggcgtgcgatatcttccatggaatggcgcagcagggcgttgcgcctaatgtggtgacatataactcggttattgatgcgctgtgcaaggccagagcaatggacaaggcagagtatttccttggtcagatggttgatagtggtgtcgtacctaataatgtcacatataatagcctcatccatggatattcctcttcaggccattcaaaggaggcggtcagggtgctgaaacagatgacaagtaagggtatcataccagatgtttttacttgcaacttgctcatggcctccctttgcaacaacagaagaagcaaagaagctgcagaactttttgactccatggccatgaagggcctgaaacctaacaccgtttcatatgctattctccttcataggtatgccactgaaggatgcctagttgacatgatcaatctcttcaactcaatggcaacagactgtattctacctaactgtcgtatcttcaacatactgattaatgcatatgctaaatctgggaagcttgataaggctatgcttatatttaaagaaatgcacaagcgaggagtgagtccagatgtagtcacctattcaactgtaatacatgcattttgcaaaatgggtagcttggacattgctatggacaaatttaaccagatggttgatatgggagtacgaccgaatgcaactgtttatcattccctaatccagggtttttgtacacatggggatttagtgaaagcaaaggaattggttactgaaatgaggaacaaagctatgcgtcctcctgatattaagttcttccattcaataatgcagaacctatgcacggaaggaagggtaattgaagcacgggatatcctcgacttgatgctgcacataggtatgaggcctgatgttcccatctttaatttactaatcggtggatactgcctagtccgcgagatggaggatgcaacaaaaatgtttgatgatatggtgtcatatggtttagaaccttgtaacaatacgtatggtatacttattaatggctattgcaaaaatagaaggattgatgacgggcttattctattcaaagagatgctgcgcaagggacttaaacctacaacttttaattataacgtcatactggatggattatttctggctggacgaactgttgctgcaaaggtgaagtttaatgagatggttgaatctggagtaagtgtgtgcattgatacatactctatagttcttggtggactttgtagaaataattgcaccggtgaagcaatcacgctgtccaagaaattaagtacaatgaatgtcaaattcaatattgcaattgtcaatatcttgattggtgcattcttcagggttcggcgaaaccaagaagctaaggatttgtttgctgctataccagccaatggcttggttcctaatgctgttacctacaccataatgatgacaaatcttataaaagaaggttcagtggaagaagctgacaatctttttttatcgatggagaagagcggctgtagtgccaactcttatatgttaaatcatatcatcagaaggttactggaaaaaggagagatggtcaaggctggaaattatatgtctaaagttgatgcaaagagctactcccttgaagctaaaactgtttcactgctgatctctctgttttcaaggaaagggaaatatagagaacacatcaaattgctccctacaaagtatcagtttctggaagaagcagccacagttgaa

SEQ ID NO: 1962 - DNA, 1089 bp, Triticum aestivum; identical to SEQ ID NO: 1960
  source 1..1089: mol_type = genomic DNA

SEQ ID NO: 1963 - DNA, 2277 bp, Triticum aestivum
  source 1..2277: mol_type = genomic DNA
atgaatatccggactactagactacactacatccccactcgtcttgctccagagttcacggcctactcaccaaggcccatgcctggcttctcctatgccgcgtcaatgtcgccactccgcctccgcctgcacgcccgccactccgcctccgcctcgcaaccctcacgcagccagggatgggatccccacgccgccttggccgtcgccacggttgccctcttcagccgcatatcccaaggcgccctccgacgtgtggcacatccaacggcttgcacctacagcatcctcatggactgctgctgccgcgcacaccgccctgatatggcactcgccttcttcggtcgtctcctcaggacgggtctggaggcagaccaagtcgttttcagcaccctcctcaagggactctgccacgcaaagcgctcagatgaggctctggacgtgctgctgcacaggatgcctgagctcggctgcaccacccacgtggtggcgtataacaccgtcatccatggcttctttagggaaggccaagtaggcaaggcgtgcgatatcttccatggaatggcgcagcagggcgttgcgcctaatgtggtgacatataactcggttattgatgcgctgtgcaaggccagagcaatggacaaggcagagtatttccttggtcagatggttgatagtggtgtcgtacctaataatgtcacatataatagcctcatccatggatattcctcttcaggccattcaaaggaggcggtcagggtgctgaaacagatgacaagtaagggtatcataccagatgtttttacttgcaacttgctcatggcctccctttgcaacaacagaagaagcaaagaagctgcagaactttttgactccatggccatgaagggcctgaaacctaacaccgtttcatatgctattctccttcatgggtatgccactgaaggatgcctagttgacatgatcaatctcttcaactcaatggcaacagactgtattctacctaactgtcgtatcttcaacatactgattaatgcatatgctaaatctgggaagcttgataaggctatgcttatatttaaagaaatgcacaagcgaggagtgagtccagatgtagtcacctattcaactgtaatacatgcattttgcaaaatgggtagcttggacattgctatggacaaatttaaccagatggttgatatgggagtacgaccgaatgcaactgtttatcattccctaatccagggtttttgtacacatggggatttagtgaaagcaaaggaattggttactgaaatgaggaacaaagctatgcgtcctcctgatattaagttcttccattcaataatgcagaacctatgcacggaaggaagggtaattgaagcacgggatatcctcgacttgatgctgcacataggtatgaggcctgatgttcccatctttaatttactaatcggtggatactgcctagtccgcgagatggaggatgcaacaaaaatgtttgatgatatggtgtcatatggtttagaaccttgtaacaatacgtatggtatacttattaatggctattgcaaaaatagaaggattgatgacgggcttattctattcaaagagatgctgcgcaagggacttaaacctacaacttttaattataacgtcatactggatggattatttctggctggacgaactgttgctgcaaaggtgaagtttaatgagatggttgaatctggagtaagtgtgtgcattgatacatactctatagttcttggtggactttgtagaaataattgcaccggtgaagcaatcacgctgtccaagaaattaagtacaatgaatgtcaaattcaatattgcaattgtcaatatcttgattggtgcattcttcagggttcggcgaaaccaagaagctaaggatttgtttgctgctataccagccaatggcttggttcctaatgctgttacctacaccataatgatgacaaatcttataaaagaaggttcagtggaagaagctgacaatctttttttatcgatggagaagagcggctgtagtgccaactcttatatgttaaatcatatcatcagaaggttactggaaaaaggagagatggtcaaggctggaaattatatgtctaaagttgatgcaaagagctactcccttgaagctaaaactgtttcactgctgatctctctgttttcaaggaaagggaaatatagagaacacatcaaattgctccctacaaagtatcagtttctggaagaagcagccacagttgaa

SEQ ID NO: 1964 - DNA, 1707 bp, Triticum aestivum
  source 1..1707: mol_type = genomic DNA
atgatcaacctgggagttcaacctgatgcggtgacctacagctcatttatcaacgcactaagcaagtccggagtaatggacaaggcagaagtggtccttcgacaaatggttgatcaaggcattgtacccaatatcattacgtatactagtctgatccatggatattccacttcgggtcagtggaaagcagcagttaggatattcaaagaaatgacaagtaccggtgttcgaccaaattctgtcacgttgaactcatttattgattccctttgcaagcatagaaagacaaaggaagctagagatatttttgactccatggccgcaaacggccacaaacctgatattttctcctactctactttgcttaatgggtatgtgaaagaaggatgcttcgatgatatgactgatctcttcaattcgatggtatggaatggtattgtacctaaccaccatgttttcaacatactgatcaatgcatatgctaaacgtggactgatggataaggctatgcacatgttcgaagtaatgaggcaacaaggagtaaacccagatgtatttagctatcaaattgtaatggattcactttgcaaaatgggcaggatggatgccgctctggacaaatttaatcagatggtcaatcaaggagtttcacctaacaaagctgtttaccaatgcctggttctgggttcttgctctcatggtcattttgtgaaagccaaggaattgatctctgaagcaattaatagaggtctgtattctaacagtgtgttcttctatcgtgtaataaacgacctttgcaaagaaggaaaggtaaacgaggcacaggatatgtttgacttcatcctaggtattggtcagcgacctgatgtgattatgtacacttcactgatggatggatattgccttgttggcgaggtggagaaagcactgagtgtactcgatgctatgaaatctgctggccttcaacctgatgatgttgtatatggtacacttcttaacggttactgtaaaattggaaggattgccgatggattgagccttttcagggaaatgtcactcagcgtggttaagcccacgactattatatacaacattatactggatgggctgttttgctctgggagaacagtttgtgcaaaggaaaaatttgatatgatgattgaaagtggcataccagtgggcgttgacacatacaatatagttcttcatggactttgtagaaacaattgcactgatgaagcaatagagctgttcaagaaattacgtgctatgaacgtgaagattaatgtcataacactcaataccatgatttctgcattgtttaaaactaggagaattgaagaagccaaggatttgtttgctactatatcagccattgggttggtgccttctgttgtgacttacagtgtaatgatgacaaatttcataaaagaagggttgctggcagatgctgatgatatgttttcagcaatggagaaggctggctgtgctcccaactccagactgctaaatcaagtggtcagggtatttctgaagaatggtgaagttgtaaaggctgtgacttatcttgctaaacttgatgcaaaacagctgtcacttgaagcttcgacggtttcgttaatagtatctctcttctcaaggaaagggaaattaaggaagcatgtaaaattgcttccggtaaagtaccagcctcctgagatgttggac

SEQ ID NO: 1965 - DNA, 2316 bp, Triticum aestivum
  source 1..2316: mol_type = genomic DNA
atgccaaccgcccgcctgtgctccatctccgcctcctccttcaaggcttcttcaggaaaaccacgagctcctgtcgccgccttggctgctgccactgagcgtgtgcgcgctggaacactaaaccaggaggacgcgcaccacctgtttgacgaattgctaagccaagccgccgccttcccagtaggcgggctgaataactttcttgccacactcgcccgtgcacggccctcagctgcctgcagcaatggccctgcccttgctgtcgccctcttcaaccgcatgtcccgaggccctggtgcacgggtggtgtcgcccacgtgctgtacctattccatcctcatggactgctgctgccgcgcaggccgcccggacttggtgcttgccttcttctgccgcctcctcaggttggggctgagcttgaatgtcacctccttcaacaacctactcaaggggctctgccagtcaaagcgtacaaatgaggctttggacgtgctgctccagcgtacgcccgaactagactgtgcgcctgatgtcgtctcgtacaacatagtaatcaacggctgtttgaaacaaggtgaagtggagaaagcgtgcaatctctaccgtgagatgatcaacctgggagttcaacctgatgcggtgacctacagctcatttatcaacacactaagcaagtccggagcaatggacaaggcagaagtggtccttcggcaaatggttgatcaaggcattgtacccaatatcattacgtatactagtctgatccatggatattccacttcgggtcagtggaaagcagcagttaggatattcaaagaaatgacaagtaccggtgttcgaccaaattctgtcacgttgaactcatttattgattccctttgcaagcatagaaagacaaaggaagctagagatatttttgactccatggccgcaaacggccacaaacctgatattttctcctactctactttgcttaacgggtatgtgaaagaaggatgcttcgatgatatgactgatctcttcaattcgatggtacagaatggtattgtacctaaccaccatgttttcaacatactgatcaatgcatatgctaaacgtggactgatggataaggctatgcacatgttcgaagtaatgaggcaacaaggagtaaacccagatgtatttagctatcaaattgtaatggattcactttgcaaaatgggcaggatggatgccgctctggacaaatttaatcagatggtcaatcaaggagtttcacctaacaaagctgtttaccaatgcctggttctgggttcttgctctcatggtcattttgtgaaagccaaggaattgatctctgaagcaattaatagaggtctgtattctaacagtgtgttcttctatcgtgtaataaacgacctttgcaaagaaggaaaggtaaacgaggcacaggatatgtttgacttcatcctaggtattggtcagcgacctgatgtgattatgtacacttcactgatggatggatattgccttgttggcgaggtggagaaagcactgagtgtactcgatgctatgaaatctgctggccttcaacctgatgatgttgtatatggtacacttcttaacggttactgtaaaattggaaggattgccgatggattgagccttttcagggaaatgtcactcagcgtggttaagcccgcgactattatatacaacattatactggatgggctgttttgctctgggagaacagtttgtgcaaaggaaaaatttgatatgatgattgaaagtggcataccagtgggcgttgacacatacaatatagttcttcatggactttgtagaaacaattgcactgatgaagcaatagagctgttcaagaaattacgtgctatgaacgtgaagattaatgtcataacactcaataccatgatttctgcattgtttaaaactaggagaattgaagaagccaaggatttgtttgctactatatcagccattgggttggtgccttctgttgtgacttacagtgtaatgatgacaaatttcataaaagaagggttgctggcagatgctgatgatatgttttcagcaatggagaaggctggctgtgctcccaactccagactgctaaatcaagtggtcagggtatttctgaagaatggtgaagttgtaaaggctgtgacttatcttgctaaacttgatgcaaaacagctgtcacttgaagcttcgacggtttcgttaatagtatctctcttctcaaggaaagggaaattaaggaagcatgtaaaattgcttccggtaaagtaccagcctcctgagatgttggac

SEQ ID NO: 1966 - DNA, 2316 bp, Triticum aestivum; identical to SEQ ID NO: 1965
  source 1..2316: mol_type = genomic DNA

SEQ ID NO: 1967 - DNA, 2316 bp, Triticum aestivum
  source 1..2316: mol_type = genomic DNA
atgccaaccgcccgcctgtgctccatctccgcctcctccttcaaggcttcttcaggaaaaccacgagctcctgtcgccgccttggctgctgccactgagcgtgtgcgcgctggaacactaaaccaggagggcgcgcaccacctgtttgacgaattgctaagccaagccgccgccttcccagtaggcgggctgaataactttcttgccacactcgcccgtgcacggccctcagctgcctgcagcaatggccctgcccttgctgtcgccctcttcaactgcatgtcccgaggccctggtgcacgggtggtgtcgcccacgtgctgtacctattccatcctcatggactgctgctgccgcgcaggccgcccggacttggtgcttgccttcttctgccgcctcctcaggttggggctgagcttgaatgtcacctccttcaacaacctactcaaggggctctgccagtcaaagcgtacaaatgaggctttggacgtgctgctccagcgtacgcccgaactagactgtgcgcctgatgtcgtctcgtacaacatagtaatcaacggctgtttgaaacaaggtgaagtggagaaagcgtgcaatctctaccgtgagatgatcaacctgggagttcaacctgatgcggtgacctacagctcatttatcaacgcactaagcaagtccggagcaatggacaaggcagaagtggtccttcggcaaatggttgatcaaggcattgtacccaatatcattacgtatactagtctgatccatggatattccacttcgggtgagtggaaagcagcagttaggatattcaaagaaatgacaagtgccggtgttcgaccaaattctgtcacgttgaactcatttattgattccctttgcaagcatataaagacaaaggaagctagagatatttttgactccatggccgcaaacggccacaaacctgatattttctcctactctactttgcttaacgggtatgtgaaagaaggatgcttcgatgatatgactgatctcttcaattcgatggtacggaatggtattgtacctaaccaccatgttttcaacatactgatcaatgcatatgctaaacgtggactgatggataaggctatgcacatgttcgaagtaatgaggcaacaaggagtaaacccagatgtatttagctatcaaattgtaatggattcactttgcaaaatgggcaggatggatgccgctctggacaaatttaatcagatggtcaatcaaggagtttcacctaacaaagctgtttaccaatgcctggttctgggttcttgctctcatggtcattttgtgaaagccaaggaattgatctctgaagcaattaatagaggtctgtattctaacagtgtgttcttctatcgtgtaataaacgacctttgcaaagaaggaaaggtaaacgaggcacaggatatgtttgacttcatcctaggtattggtcagcgacctgatgtgattatgtacacttcactgatggatggatattgccttgttggtgaggtggagaaagcactgagtgtactcgatgctatgaaatctgctggccttcaacctgatgatgttgtatatggtacacttcttaacggttactgtaaaattggaaggattgccgatggattgagccttttcagggaaatgtcactcagcgtggttaagcccacgactattatatacaacattatactggatgggctgttttgctctgggagaacagtttgtgcaaaggaaaaatttgatatgatgattgaaagtggcataccagtgggcgttgacacatacaatatagttcttcatggactttgtagaaacaattgcactgatgaagcaatagagctgttcaagaaattacgtgctatgaacgtgaagattaatgtcataacactcaataccatgatttctgcattgtttaaaactaggagaattgaagaagccaaggatttgtttgctactatatcagccattgggttggtgccttctgttgtgacttacagtgtaatgatgacaaatttcataaaagaagggttgctggcagatgctgatgatatgttttcagcaatggagaaggctggctgtgctcccaactccagactgctaaatcaagtggtcagggtatttctgaagaatggtgaagttgtaaaggctgtgacttatcttgctaaacttgatgcaaaacagctgtcacttgaagcttcgacggtttcgttaatagtatctctcttctcaaggaaagggaaattaaggaagcatgtaaaattgcttccggtaaagtaccagcctcctgagatgttggac

SEQ ID NO: 1968 - DNA, 2316 bp, Triticum aestivum; identical to SEQ ID NO: 1967
  source 1..2316: mol_type = genomic DNA

SEQ ID NO: 1969 - DNA, 2259 bp, Triticum aestivum
  source 1..2259: mol_type = genomic DNA
atgcctcgtttctcctccaccacgtcaatgtcgtcactccgcctccgcctccacgcccgccactcctcctccgcctctcaaccctcacacagccagggctgggatccccacgccgccttcgccgccgccacggagcgtgcccgctctggcaaactcaccccgaaggacgcacaccacctgttcgacgaattgctgcggcaggccaatcctgtccaggagcgccccctcaacaaccttctctccgcccttgcccgcgctccggcgtccgccgcctgcagaaacggccctgcactcgcggtcaacctcttcgtccgcatatcccaaggcgcccgccgacgtgtggcgcacccaacggcctgcacctacggcatcctcatggactgctgctgccgcgcacaccgcctcgatctggcgttcgctttcttcggccgtctcctcaggacgggacttaaggcaggcgtcattcaagtttgcactcttctcaagggcctctgccgcgcaaagcgggctgatgaggctctcgacgtgctgcttcacaggatgcctgagctgggctgcactcccgatgtggtggcatataccacggtcatccacggcttctttaaggaaggccaagtargcaaggcatgcaatctattccatgaaatggcgctgcagggcgttacacctgatgtggtgacatataactcggttattgatgcgctgtgcaaggccagagcaatggacaaagcagagtatttccttcgtcagatgattggtaatggtgtcgtacctaataatgtgacatataatagcctcatccatggatattcctcttcaggccattggaaggaggcggttagggtgctgaaagaaatgacaagtcaaggtatcatacctgatatcgtttcataccgtattctgcttcatgggtatgccaccgaagggtgcttagttgatatgattaatctcttcaattcaatggcaagatactgtattctacctgattgtcatatcttcaacatactgattaatgcatatgctaaatctgggaagcttgataaggctatgcttatatttaaagaaatgcagaaacaaggagtgagtccaaatgcagtcacatattcaactgtaatagatgcattttgcaaaaagggtcagttggacgatgctatgataaagtttaatcagatgattgatacaggagtaccacagggcacagctgtttatggttctctaatccagggtttttgtacacacggcaatttggtgaaagcaaaggaattgcttactgaaatgatgaacaaaggtatacctcctcctgatattaagttcttccattcaatcatgcagaacctttgcacagaaggaagggtaatagaagcacgggatgtccttggcttgatagcgcacataggtatgaggcctaatgtttgcacatttaatatactgatcggtggatattgcctagtcggcaagatggaggatgcctcaaaaatatttgatgatatgatgtcatatggcttagaaccttctaatattacgtatgctatacttattaatggctattgcaaaaacgaaaggattaacgatgggctgattctgttcaaagaaatgttgcgcaagggacttaaacctacaacttttaattacaacgtcatactggatggattatttctggctggacgaactgttgctgcaaaggaaaagtttgatgagatggttgaatttggagtaagtgtgcgcattgatacatattcgatagttcttggtggactttgtagaaataattgtaacggcgaagcaatcacgctattccagaaattaagcacaatggatgtgaaattcaatattacaattgtcaatataatgattgatgccttctacagggttcagcgaaaccaagaagccaaggatttgtttgctgcagtatcagccaatggtttggtagctaatgtctttacctacaccataatgatgaaaaatcttataaaagaagggtcagtggaagaagctgacgatctctttttatcaatggagaagagcggctgtactgctgactcttatatgttaaatcttatcgtcagaatgttactggaaaaaggagagctagtcaaggctgggaattatatgtctaaagttgatgcaaagagctactcacttgaagctgaaaccgtttcgctgcttatctctctcttttcagggaaagggaaatatagagaacacataggattgctccctacaaagtatcagtttcgtgaagaagcggccacagttgaa

SEQ ID NO: 1970 - DNA, 2259 bp, Triticum aestivum
  source 1..2259: mol_type = genomic DNA
atgcctcgtttctcctccaccacgtcaatgtcgtcactccgcctccgcctccacgcccgccactcctcctccgcctctcaaccctcacacagccagggctgggatccccacgccgccttcgccgccgccacggagcgtgcccgctctggcaaactcaccccgaaggacgcacaccacctgttcgacgaattgctgcggcaggccaatcctgtccaggagcgccccctcaacaaccttctctccgaccttgcccgcgctccggcgtccgcggcctgcagaaacggccctgcactcgcggtcaacctcttcgtccgcatatcccaaggcgcccgccgacgtgtggcgcacccaacggcctgcacctacggcatcctcatggactgctgctgccgcgcacaccgcctcgatctggcgttcgctttcttcggccgtctcctcaggacgggacttaaggcaggcgtcattcaagtttgcactcttctcaagggcctctgccgcgcaaagcgggctgatgaggctctcgacgtgctgcttcacaggatgcctgagctgggctgcactcccgatgtggtggcatataccacggtcatccacggcttctttaaggaaggccaagtaggcaaggcatgcaatctattccatgaaatggcgctgcagggcgttacacctgatgtggtgacatataactcggttattgatgcgctgtgcaaggccagagcaatggacaaagcagagtatttccttcgtcagatgattggtaatggtgtcgtacctaataatgtgacatataatagcctcatccatggatattcctcttcaggccattggaaggaggcggttagggtgctgaaagaaatgacaagtcaaggtatcatacctgatatcgtttcataccgtattctgcttcatgggtatgccaccgaagggtgcttagttgatatgattaatctcttcaattcaatggcaagatactgtattctacctgattgtcatatcttcaacatactgattaatgcatatgctaaatctgggaagcttgataaggctatgcttatatttaaagaaatgcagaaacaaggagtgagtccaaatgcagtcacatattcaactgtaatagatgcattttgcaaaaagggtcagttggacgatgctatgataaagtttaatcagatgattgatacaggagtaccacagggcacagctgtttatggttctctaatccagggtttttgtacacacggcaatttggtgaaagcaaaggaattgcttactgaaatgatgaacaaaggtatacctcctcctgatattaagttcttccattcaatcatgcagaacctttgcacagaaggaagggtaatagaagcacgggatgtccttggcttgatagcgcacataggtatgaggcctaatgtttgcacatttaatatactgatcggtggatattgcctagtcggcaagatggaggatgcctcaaaaatatttgatgatatgatgtcatatggcttagaaccttctaatattacgtatggtatacttattaatggctattgcaaaaacgaaaggattaacgatgggctgattctgttcaaagaaatgttgcgcaagggacttaaacctacaacttttaattacaacgtcatactggatggattatttctggctggacgaactgttgctgcaaaggaaaagtttaatgagatggttgaatttggagtaagtgtgcgcattgatacatattcgatagttcttggtggactttgtagaaataattgtagcgacgaagcaatcacgctattccagaaattaagcacaatggatgtgaaattcaatattacaattgtcaatataatgattgatgccttctacagggttcagcgaaaccaagaagccaaggatttgtttgctgcagtatcagccaatggtttggtagctgatgtctttacctacaccataatgatgaaaaatcttataaaagaagggtcagtggaagaagctgacgatctctttttatcaatggagaagagcggctgtactgctgactcttatatgttaaatcttatcgtcagaatgttactggaaaaaggagagctagtcaaggctgggaattatatgtctaaagttgatgcaaagagctactcacttgaagctgaaaccgtttcgctgcttatctctctcttttcagggaaagggaaatatagagaacacataggattgctccctacaaagtataagtttcgtgaagaagcggccacagttgaa

SEQ ID NO: 1971 - DNA, 990 bp, Triticum aestivum
  source 1..990: mol_type = genomic DNA
atgccagccgcccgcctgtcctccatctccacctcctccttcagggctccttcacgagcccccctcgccgccttggctgccgccacggagcgtgtccgcgcgggaacgctgagccaggaggacgcgcaccacctgttcgaccaattgcttggccaagccgccgccgtcccggaacgcgggctcaacaactttcttgccgcactcgcccgtgctccaccctcagctgcctgccgcgatggccccggccttgccatcgccctcttcaaccgcatgtcccgaggcgctggtgcacgggtggcgtcgcccacgctctgtacctattccatcctcatggactgctgctgccgcgcaggccgcccggacttggtgcttgccttcttcggccgcctcctcaggttggggctgcgcttggatatcatctcctccagcaatctcctcaaggggctctgccaggccaagcgttcaaatgaggctttggacatgctgctccaccggatgcccgaactggactgtgtgcctgatgtcttctcgtacagcatagtaatcaacggctgttttaaacaaggtgaagtagacaaagcgtgcaatctcttccatcagatgccccaactgggagttcaacctaatgtggtgatctacaactcagttatcgacgcactaagcaaatccggagcaatggacaaggcagaagtggtccttcggcaaatggttgatcaaggaattgaacccaatatcaagacatataactgtctgatccatggatattctacttttggtcagtggaaggaggcacttagggtattcaaagaaatggcaagtcttggtgttgtaccagacgttgtcacgttgacctcattaatcgattccctttgcaagcacagaaggacaaaggaagctagagaaatttttgactctatggctgcaaagggcctgcctggttctgggttcttgctctcatggtcattttgtgaaagccaaggatttgatctc

SEQ ID NO: 1972 - DNA, 990 bp, Triticum aestivum; identical to SEQ ID NO: 1971
  source 1..990: mol_type = genomic DNA

SEQ ID NO: 1973 - DNA, 990 bp, Triticum aestivum
  source 1..990: mol_type = genomic DNA
atgccagccgcccgcctgtcctccatctccacctcctccttcagggctccttcacgagcccccctcgccgccttggctgccgccacggagcgtgtccgcgcgggaacgctgagccaggaggacgcgcaccacctgttcgaccaattgcttggccaagccgccgccgtcccggaacgcgggctcaacaactttcttgccgcactcgcccgtgctccaccctcagctgcctgccgcgatggccccggccttgccatcgccctcttcaaccgcatgtcccgaggcgctggtgcacgggtggcgtcgcccacgctctgtacctattccatcctcatggactgctgctgccgcgcaggccgcccggacttggtgcttgccttcttcggccgcctcctcaggttggggctgcgcttggatatcatctcctccagcaatctcctcaaggggctctgccaggccaagcgttcaaatgaggctttggacatgctgctccaccggatgcccgaactggactgtgtgcctgatgtcttctcgcacagcatagtaatcaacggctgttttaaacaaggtgaagtagacaaagcgtgcaatctcttccatcagatgccccaactgggagttcaacctaatgtggtgatctacaactcagttatcgacgcactaagcaaatccggagcaatggacaaggcagaagtggtccttcggcaaatggttgatcaaggaattgaacccaatatcaagacatataactgtctgatccatggatattctacttttggtcagtggaaggaggcacttagggtattcaaagaaatggcaagtcttggtgttgtaccagacgttgtcacgttgacctcattaatcgattccctttgcaagcacagaaggacaaaggaagctagagaaatttttgactctatggctgcaaagggcctgcctggttctgggttcttgctctcatggtcattttgtgaaagccaaggaattgatctc

SEQ ID NO: 1974 - DNA, 2337 bp, Triticum aestivum
  misc_feature 138: note = n is a, c, g, or t
  source 1..2337: mol_type = genomic DNA
atgtttatcaatttcgcaaacttttatcaaattcatgaactttttcgtcaaattcataaaaaaattcaaatcgatggaaaaaaattcaattttgcaaacttttttcaaatcgtcaactttttgttaaattcgtggacntttttttttttgcaagtgcatggaattgacgcccctgcggcacgggcgctagtcgctacatggtggcagaaatttgccgggttgcaactcacccgagaagaaaatgtgatgcatccctctgatccgatcttcggggcgccctggggatcaagaaatagcattgataagagtgcagctcacctgatgggtgtgagcattactcggaaagactcatcagaaaatcatcaagtgccattgtaccccaagcacacgcccccgccgccgccagactcgtcagccgcgtacgaggccgctcaccggcgggcaagtccaccggtcccgcctcctgcgttcacttcctcggcagcggcgctggttgctgcgcgcgcgccgagcgtcgcaggtgacaccaatcgatcgcggtgcgcctcttcagcggacgcacgcacatcccgcgtcgagctcggctggaatcggccagaaatgccagccgcccgcctgtcctccatctccacctcctccttcagggctccttcacgagcccccctcgccgccttggctgccgccacggagcgtgtccgcgcgggaacgctgagccaggaggacgcgcaccacctgttcgaccaattgcttggccaagccgccgccgtcccggaacgcgggctcaacaactttcttgccgcactcgcccgtgctccaccctcagctgcctgccgcgatggccccggccttgccatcgccctcttcaaccgcatgtcccgaggcgctggtgcacgggtggcgtcgcccacgctctgtacctattccatcctcatggactgctgctgccgcgtaggccgcccggacttggtgcttgccttcttcggtcgcctcctcaggttggggctgcgcttggatatcatctcctccagcaatctcctcaaggggctctgccaggccaagcgttcaaatgaggctttggacatgctgctccaccggatgcccgaactggactgtgtgcctgatgtcttctcgtacagcatagtaatcaacggctgttttaaacaaggtgaagtagacaaagcgtgcaatctcttccatcagatgccccaactgggagttcaacctaatgtggtgatctacaactcagttatcgacgcactaagcaaatccggagcaatggacaaggcagaagtggtccttcggcaaatggttgatcaaggaattgaacccaatatcaagacatataactgtctgatccatggatattctacttttggtcagtggaaggaggcacttagggtattcaaagaaatggcaagtcttggtgttgtaccagacgttgtcacgttgacctcattaatcgattccctttgcaagcacagaaggacaaaggaagctagagaaatttttgactctatggctgcaaagggcctgaaacctaatatcgtctcctactctactatgcttaatgggtatgtcaaagaaggatccttcgaggatatgactgatctcttcaattcgatggtacggaatggtgttgtaccaaaccaccatattttcaacatactgatcaatgcatatgctaaacgtggactgatggatgaggctatgcacatgttcgaagtaatgaggcaacaaggagtaaacccagatgtagttgactatctagtaataatggattcactttgtaaaatgggtaggatggatgctgctgtggacaaatttaatcagatggtcaatcaaggagtttcacctaacaaagctgtttaccaatgcctggttctgggttcttgctctcatggtcattttgtgaaagccaaggatttgatctctgaagcaattaatagaggtctgttttctaacagtgtgttcttctatcctgtaataaacgacctatgcaaagaaggaaaggtaaacgaggcacaggatatgtttgacttcattctaggtattggtcggcggcctgatgtgattatgtacaattcactgatggatggatattgccttgttggcaaggtggaggaagcactaagagtacttgatgctatgaagtctgctggcctccaacctactgctgttacgtatgctatacttcttaatggctactgtaaaattggcaggatcgccgatggattgagtcttttcagggaaatgtcactcagcggggttaaacccacgacttttatcaacaacaacaacaacaacaaagcctttagtcccaaacaagttggggtaggc

SEQ ID NO: 1975 - DNA, 2295 bp, Triticum aestivum
  source 1..2295: mol_type = genomic DNA
atgccaaccgcccgcctgtcctccatctccacctcctccttcagggcccccctcgccgccttggctgccgccacggaacgcgttctcgctggaacgctaagccgggaggatgcgcaccacctgttcgacgaattgctaggccaagccgccgccgccccggaacacgggctgaacaactttcttgccgcactcgcccgtgctccaccctcagctgcctgcagcgatggccccggccttgccatcgccctcttcaaccgcatgtcccgaggcgctggtgcacgggtggtgtcgcccacgctctgtacctattccatcctcatggactgctgctgccgtgcacgccgcccagagttggtggttgccttcttcggccgcctcctcaggttggggctgcgcttggatatcatctcctccagcaatctcctcaaggggctctgccaggccaagcgttcaaatgaggctttggacatgctgctccaccggatgcccgaactggactgtgcacctgatgtcttctcgttcaacatagtaatcaacggctgctttaaagaaggtgaagtagacaaagcgtgcaatctcttccatgagatgccccaactgggagttcaacctgatgtggtcacctacacctcaatcatcaacgcactaagcaagtctggagcaatggacaaggcagaagtggtccttcggcaaatggttgatcaaggcattggacccaacatcaggacatatactagcctgatacatggatattccgcttcgggtcagtggaaggcggcagctagagtattcaaagagatggtaagtcttggtgttctaccaaatgttgtcacatggaactcatttatggattcactttgcaagcatagaaggacaaaggaagctcgagatatttttgactccatggctgcaaagggtcaaaaacctgatattgtctcctactctattatgcttaacgggtacgcgaaagaaggatacttcgatgacatgactgatttgttcaattcgatgctacagaatggtattgtacctaatcaccatgttttcaacatattgattaatgcatatgctaaacgtggactgatggatgaggctatgcacatgtttgaagtaatgaggcaacaaggagtaaacccaaatgtagttagctatcaagtcataatggattcactttgtaaaatgggtaggatggatgctgctctggaaaaatttaatcagatggtcaatcaaggagtttcagctgacaaagctgtttaccgatgcctggttctgggttcttgttctcatggtgattttgtgaaggccaaggaattgatttctgaagccgttaatagaggtctgtgttctaacagtgtgttcttctattctgtaataaatgacctgtgcaaagaaggaaaggtgaaggaggcacaggatatgtttcacttcattgtaggtattggtcagcggcctgatgtgattatgtacacttcactgatggatggatattgccttgttggcaaggtggaggaagcactgagagtacttgatgctatgaagtctgctggcctccaacctactgctgttacgtatgctatacttcttaatggctactgtaaaattggcaggatcgccgatggattgagtcttttcaaggaaatgtcactcagcggggttaaacccacgactattatgtacaacattatacttgatgggctgtttcgctccgggagaacagtttctgcaaaggaaaaattctgtacgatgagcgaaagtggcataccagtgggcattgacacatacaacatagttcttagtggactttgtaaaaataattgcactggtgaagcaatagagctattcaagaaactacgtgcaatgaatgtgaagattgatgtcataacactcaatatcatgatttctgcaatgtttaaaactaggagaattgaagaagccaaggatttgtttgctactatatcagccatcgggttggtgccttctgttgtgacatacagcttaatgatgacaaacttcataaaagaagggttgctggcagaggctgatgatatgtttttagcagtggagaaggctaactgtgctcccaactccaggctgctaaatcatgtggtcagggtgttgctggaaaaaggtgcagttgtaaagggtgcaaattatctggctaaacttgatgcaaaacagatgtcacttgatgtttcaacgatttcgttaattgtgtctctcttctcaggggaagggaaattgagggagcacgtaaaattgcttccggtaaagtaccagcctcctgagaattccggc

SEQ ID NO: 1976 - DNA, 2295 bp, Triticum aestivum
  source 1..2295: mol_type = genomic DNA
atgccaaccgcccgcctgtcctccatctccacctcctccttcagggcccccctcgccgccttggctgccgccacggaacgcgttcgtgctggaacgctaagccgggaggatgcgcaccacctgttcgacgaattgctaggccaagccgccgccgccccggaacacgggctgaacaactttcttgccgcactcgcccgtgctccaccctcatctgcctgcagcgatggccccggccttgccatcgccctcttcaaccgcatgtcccgaggcgctggtgcacgggtggtatcgcccacgctctgtacctattccatcctcatggactgctgctgccgtgcacgccgcccagagttggtggttgccttcttcggccgcctcctcaggttggggctgcgcttggatatcatctcgtccagcaatctcctcaaggggctctgccaggccaagcgttcaaatgaggctttggacatgctgctccaccggatgcccgaactggactgtgcgcctgatgtcttctcattcaacatagtaatcaacggctgctttaaagaaggtgaagcagacaaagcgtgcaatctcttccatgagatgcctcaactgggagttcaacctgatgtggtcacctacacctcaatcatcaacgcactaagcaagtctggagcaatggacaaggcagaagtggtccttcggcaaatggttgatcaaggcattggacccaacatcaggacatatactagcctgatacatggatattccgcttcgggtcagtggaaggcggcagctagagtattcaaagagatggtaagtcttggtgttctaccaaatgttgtcacatggaactcatttatggattcactttgcaagcatagaaggacaaaggaagctcgagatatttttgactccatggctgcaaagggtcaaaaacctgatattgtctcctactctattatgcttaacgggtacgcgaaagaaggatacttcgatgacatgactgatttgttcaattcgatgctacagaatggtattgtacctaatcaccatgttttcaacatattgattaatgcatatgctaaacgtggactgatggatgaggctatgcacatgtttaaagtaatgaggcaacaaggagtaaacccaaatgtagttagctatcaagtcataatggattcactttgtaaaatgggtaggatggatgctgctctggacaaatttaatcagatggtcaatcaaggagtttcacctgacaaagctgtttaccgatgcctggttctgggttcttgttctcatggtgattttgtgaaggccaaggaattgatttctgaagctgttaatagaggtctgtgttctaacagtgtgttcttctattctgtaataaatgacctgtgcaaagaaggaaaggtgaaggaggcacaggatatgtttcacttcattgtaggtattggtcagcggcctgatgtgattatgtacacttcactgatggatggatattgccttgttggcaaggtggaggaagcactgagagtacttgatgctatgaagtctgctggcctccaacctactgctgttacgtatgctatacttcttaatggctactgtaaaattggcaggatcgccgatggattgagtcttttcaaggaaatgtcactcagcggggttaaatccacgactattatgtacaacattatacttgatggactgtttcgctccgggagaacagtttctgcaaaggaaaaattctgtacgatgagcgaaagtggcataccagtgggcattgacacacacaacatagttcttagtggactttgtaaaaataattgcactggtgaagcaatagagctgttcaagaaactacgtgcaatgaatgtgaagattgatgtcataacactcaatatcatgatttctgcaatgtttaaaactaggagaattgaagaagccaaggatttgtttgctactatatcagccatcgggttggtgccttctgttgtgacatacagcttaatgatgacaaacttcataaaagaagggttgctggcagaggctgatgatatgtttttagcagtggagaaggctaactgtgctcccaactccaggctgctaaatcatgtggtcagggtgttgctggaaaaaggtgcagttgtaaagggtgcaaattatctggctaaacttgatgcaaaacagatgtcacttgatgtttcaacgatttcgttaattgcgtctctcttctcaggggaagggaaattgagggagcacgtaaaattgcttccggtaaagtaccagcctcctgagaattccggc

SEQ ID NO: 1977 - DNA, 1713 bp, Triticum aestivum
  source 1..1713: mol_type = genomic DNA
atgccccaactgggagttcaacctgatgtggtgacctacaactcaattattgacgcactaagcaagtccggagcaatggacaaggcagaagtgctccttcggcaaatggttgatcaaggaattgaacccaatatcaggacatatagctgtctaatccatggatattctacttttggtcagtggaaggaggcacttagggtattcaaagaaatggcaagtcttggtgttgcaccagacgttgtcacgttgagctcattaatcgattccctttgcaagcacagaaggacaaagcaagctagagaaatttttgactctatggctgcaaagggcctgaaacctgatatcgtctcctactctactatgcttaatgggtatgtcaaagaaggatccttcgaggatatgactgatctcttcaattcgatggtacggaatggtattgtacctaatcaccatgttttcaacatactgatcaatgcatatgctaggcgtggactgatggatgaagctatgcacatgttcgaagtaatgaggcaacaaggagtaaacccggatgtagttagctatctagtagtaatggattcactttgcaaaatgggtaggatggatgctgctctggacaaatttaatcagatggtcaatcaaggagtttcacctaacaaagctgtttaccaatgcctggttctgggttctttctctcatggtgattttgtgaaagccaaggaattgatttctgaagcagttaatagaggtatgtgttctaacagtgtgttcttctatcctgtaataaacgacctttgcaaagaaggaaaggtaaaggaggcacaggatatgtttgacttcatcctaggtattggtcagcggcctgatgtgattatgtacacttcactgatggatggatattgccttgttggcaaggtggagaaagcactgagtgtactcgatgctatgaaatctgctggccttcaacctgatgatgttgtatatgctacacttcttaacggttactgtaaaattggaaggattgccgatggattgagccttttcagggaaatgtcactcagcggggttaagcccacgactattatatacaacattatactggatgggctgttttgctctgggagaacaggttttgcaaaggaaaaattccatacgatgactgaaagtggcataccagtaggcgttgacacatacaacatagttcttagtggactttgtagaaacaattgcactgatgaagcaatagaactgttcaagaaactacgtgcaacgaacgtgaagattgatgtcatgacactcaatatcatgatttctgcaatgtttaaaactaggagaattgaagaagctaaggatttgtttgctactatatcagccatcggattggtgccttctgttgtgacttacagtttaatgatgacgaatttcataaaagaagggttgttggcagacgctgatgatacctttttggtaatggagaaagctggctgtgctcccaactccagtctgctaaatcaggtggtcagggtgttgctggaaaaaggtgcagttgtaaaggctgcaacttatctcgctaaacttgatgctaaacagctgtcagttgaagcttcaacgatttcgttaatagtatctctcttctcaggggaagggaaactaagggagcatgtagagttgcttccagtaaagtaccagcctcctcagagttcggctgacaat

SEQ ID NO: 1978 - DNA, 2145 bp, Triticum aestivum
  source 1..2145: mol_type = genomic DNA
atgagccgccgcgttgtccccgtcggcagacgcatcttggagcagaacatcaagggccggtaccgcacgggacacattggcaccgtggatgcactccacctgtttgacgaattgctccaggttgctcagccctcctcgattgctgccatcaactgcctcctcaccgtcttcggccgtgattgccctgcgctcggcgtctccctcttcaaccgtgttgcaagaaccaaggtgcctctccagagtgtcacctatggcattctagtcaactgctgctgcggcgctggccgcttggacctcggttttgccgccatgggcaacatcattaagatgggttttatgaaagaatccgttgttgctttcagccacctactcaaggccatctgtgcggagaacaagacaagctatgcaatggacatcgtactccgagtaatgcctgagcttaactgcacacccaacattttctcctacagcattcttttcaagggtctctgcaacgacaagagaagccaagaggctctcgacctgattcacatcatggttgagcatggaggtagctgccaacctaatgtggtgtcctatagcaccgtaattgatggcttgttgaaagagggtgaagtgaacaaggcttacagtctattttgtgaaatgttacagaggggaatttcgccggatgttgtgacctgtagttcgattatttctggcatgtgcaagcttcatgcgatggacaaggctgaggacgttcttcaacagatgcttgatagaggaattctgccagatgttgctacatatactagtctaatgcatggatattattcattaggacagtgcgaggaggtggatcggattttcaaagaaatgtctagaaatggtgttcaaccagatattgtaacttacaatatacagatggattatctttgcaagagcggaagatgcgcagaagctaggaagatttttgattccatggtcagtttgggccaaaaaccagatgttactacctacaacgttctgcttcatgggtatgctatggaaagatcttttcatgatatgaattgtctcattgagttgatggatgataatggtatttcaccagatcattatggctacaacatactcatatctgcttatgctaaagaaaaaatggttgatgaagtaatgcatatatttacaaaaatgcggcagcaaggactgaaccctgatgtagcgaactatggagcggcagtaaacttgctttccaagattggccgaatggatgatgctatgtcccaattcaatcaaatgataactgaagggttagctcctgatatcatagttttcaccccccttattagtggtttctgttcttgtggcaaatgggagaaggttgatgaactattttctgagatgttggatcgcggcatctgtcccaacacagtgttcttcaacacaattatggaccgcctttgcaaaaatggaagggttatggaagcccaagatctcttcgacctgatggtacacatgggtgtgaagcctgatgtgtgtacttataacacactgataggtggatacttgttcgttggtaagatggatgaagtgagcaagttacttgacaatatggtctcaattggcatggaaccagatgttatcacctataacatactgattgatggttactctaagaatggaaggatagatgatgcattggttgttttcagggaaatgttggacaggaaggttaagccttgtgttatcacttttaatagtatgattggtgcattgcttaaatgtggtaggaaggcagaagccaaagatttgtttgacggtatctgggccaacggattagtgcccgacgttattacatatagcttaatgatacaaaaacttattgaagaaggttctctacaagagtctgatgatctattcctttctatggagaagaatggatgtgctgccgactcccgtatgctaaattctatggttagaagcttacttcagaaaggggaggtgcccagggctgggacttatctgtctaaaattgatgagaggaggttcacctttgaagcgtccacagctagcttgttggctgcacttgcgtcagggggaaaaagccaggaatataaggagttactccctgaaaaataccactattttctggaacagggcactgat

SEQ ID NO: 1979 - DNA, 2145 bp, Triticum aestivum; identical to SEQ ID NO: 1978
  source 1..2145: mol_type = genomic DNA

SEQ ID NO: 1980 - DNA, 2145 bp, Triticum aestivum; identical to SEQ ID NO: 1978
  source 1..2145: mol_type = genomic DNA

SEQ ID NO: 1981 - DNA, 2223 bp, Triticum aestivum
  source 1..2223: mol_type = genomic DNA
atgcctcgcttctcctccaccacgccaatgtcgccaccccgcctcctcctccggctcggcgcccgccactcctcctccacctctcatccctcacgcatctgggatccccacgccgccttcgccgctgcgacgcagcgggcgcgctctggcacgctcaccacggaggacgcacaccacctgtttgatgaattgctgcggcagggcaatcctgtccaggagcgtcccttgactaactttctggctgccctcgcccgcgcgcccgcgtccgcattctgcagcgatggccctgccctggccgtcgccctcttcggccgtttgtcccgaggcgccggacgacgggtggcgcagccaaatgtcttcacctatggcgtcctcatggactgctgctgccgtgcgcgccgcctggatctagcgatcgccttcttcgcccgtctcctcaagacgggactggaggcaaaccaagtcatcttctgcaccctcctcaagggactctgccacgcaaagcgctcagatgaggctttggacgtggtgcttcacaggatgcctgagctaggctgcacccccaacgtggtggcctataccacggtcatccacggcttcttgaaggaaggccaagtaggcaaggcatgcaatctattccatggaatggcgcagcagggcgttgcgcctgatgtggtgacatataactcggttatcgatgcgttgtgcaaggccagagcaatggacaaggcagagtatttcctttgtgaaatggttgataatggtgtcgtacctaataatgtgacatataatagcctcatccatggatattcctctttgggccatcagaaggaggctgttagggtgctgaaagaaatgacaagacagggtatcataccagatgtcattacctgcacctcactcatgaccttcctttgcaagaatggaaaaagcaaggaagctgcagaaatttttgattcaatgcccacgaagggcctgaaacatgacgccgtttcatatgctattctccttcatgggtatgccactgaaggatgcttggttgatatgattaatctcttcaattcgatggacagagactgtattctacctaactgtcatatcttcaacatactgatttatgcatatgctaaatctgggaagcttgataaggctatgcttatatttagagatatgcagaaacaaggagtgagtccagatgcagtcacatattcaaccgtaatacatgcattttgcaaaaagggtaggttggatgatgctgtgataaagtttaatcagatgattgatacaggagtacgaccggaagcatctgcttatcgttccctaatccagggtttttgtacacatggcgatttggtgaaagcaaaggaatatgttactgaaatgatgaagaaaggtatgcttcctcctgatattatgttcttcagttcaatcatgcagaaactatgcacagaaggaagggtaatagaagcacgagatatccttgacttgatagtgcgcattggtatgaggcctaatgttttcatatttaatatactgatcggtgggtactgcctagtctgcaagatggaggatgcaacaaaaatgtttgaggatatggtgtcatttggtttagaaccttgtaatattacgtatggtatacttattaatggctattgcaaaaatagaaggattgatgatgggcttattctgttccaagagatgctgcacaagggacttaaacctacaacttttaattataatgtcatactggatgggttatttctggctggacgaactgttgctgcaaaggaaaagtttgatgagatggttgaatctggagtaagtgtgtgcagtgatacatattcgatagttcttgctggactttgcagaaataattgctctagcgaagtaatcatgctgttccagaaattaagggcaatgaacatgaaattcaatattagaattgtcactatcatgattgatgccttctacaaggttcggcgaaaccaagaagctaaggatttgtttgctgcaataccatccaatggcttggtagctaatgttgttacctacagcataatgatgaaaagtcttataaaagaaggttcagtggaagaagctgacactctttttatcgatggagaagagcggctgtactgcaaactcttggatgttaaatcatattatcagaaggttactggaaagaggagagatagtcaaggctggaaattatatgtcgaaagt

SEQ ID NO: 1982 - DNA, 2223 bp, Triticum aestivum; identical to SEQ ID NO: 1981
  source 1..2223: mol_type = genomic DNA

SEQ ID NO: 1983 - DNA, 2223 bp, Triticum aestivum
  source 1..2223: mol_type = genomic DNA
atgcctcgcttctccaccaccacgccaatgtcgccaccccgcctcctcctccgactcggcgcccgccactcctcctccacctctcatccctcacgcatctgggatccccacgccgccttcgccgctgcgacgcagcgggcgcgctctggcacgctcaccacggaggacgcacaccacctgtttgatgaattgctgcggcagggcaatcctgtccaggagcgtcccttgactaactttctggctgccctcgcccgcgcgcccgcgtccgcattctgcagcgatggccctgccctggccgtcgccctcttcggccgtttgtcccgaggcgccggacgacgggtggcgcagccaaatgtcttcacctatggcgtcctcatggactgctgctgccgtgcgcgccgcctggatctagcgatcgccttcttcgcccgtctcctcaagacgggactggaggcaaaccaagtcatcttctgcaccctcctcaagggactctgccacgcaaagcgctcagatgaggctttggacgtggtgcttcacaggatgcctgagctaggctgcacccccaacgtggtggcctataccacggtcatccacggcttcttgaaggaaggccaagtaggcaaggcatgcaatctattccatggaatggcgcagcagggcgttgcgcctgatgtggtgacatataactcggttatcgatgcgttgtgcaaggccagagcaatggacaaggcagagtatttcctttgtgaaatggttgataatggtgtcgtacctaataatgtgacatataatagcctcatccatggatattcctctttgggccatcagaaggaggctgttagggtgctgaaagaaatgacaagacagggtatcataccagatgtcattacctgcacctcactcatgaccttcctttgcaagaatggaaaaagcaaggaagctgcagaaatttttgattcaatgcccacgaagggcctgaaacatgacgccgtttcatatgctattctccttcatgggtatgccactgaaggatgcttggttgatatgattaatctcttcaattcgatggacagagactgtattctacctaactgtcatatcttcaacatactgatttatgcatatgctaaatctgggaagcttgataaggctatgcttatatttagagatatgcagaaacaaggagtgagtccagatgcagtcacatattcaaccgtaatacatgcattttgcaaaaagggtaggttggatgatgctgtgataaagtttaatcagatgattgatacaggagtacgaccggaagcatctgcttatcgttccctaatccagggtttttgtacacatggcgatttggtgaaagcaaaggaatatgttactgaaatgatgaagaaaggtatgcttcctcctgatattatgttcttcagttcaatcatgcagaaactatgcacagaaggaagggtaatagaagcacgagatatccttgacttgatagtgcgcattggtatgaggcctaatgttttcatatttaatatactgatcggtgggtactgcctagtctgcaagatggaggatgcaacaaaaatgtttgaggatatggtgtcatttggtttagaaccttgtaatattacgtatggtatacttattaatggctattgcaaaaatagaaggattgatgatgggcttattctgttccaagagatgctgcacaagggacttaaacctacaacttttaattataatgtcatactggatgggttatttctggctggacgaactgttgctgcaaaggaaaagtttgatgagatggttgaatctggagtaagtgtgtgcagtgatacatattcgatagttcttgctggactttgcagaaataattgctctagcgaagtaatcatgctgttccagaaattaagggcaatgaacatgaaattcaatattagaattgtcactatcatgattgatgccttctacaaggttcggcgaaaccaagaagctaaggatttgtttgctgcaataccatccaatggcttggtagctaatgttgttacctacagcataatgatgaaaagtcttataaaagaaggttcagtggaagaagctgacactctttttatcgatggagaagagcggctgtactgcaaactcttggatgttaaatcatattatcagaaggttactggaaagaggagagatagtcaaggctggaaattatatgtcgaaagt

SEQ ID NO: 1984 - DNA, 2223 bp, Triticum aestivum; identical to SEQ ID NO: 1983
  source 1..2223: mol_type = genomic DNA

SEQ ID NO: 1985 - DNA, 930 bp, Triticum aestivum
  source 1..930: mol_type = genomic DNA
atgcctgagctgggctgcacccctgacgtggtggcgtatagcacggtcatccatggcttcttcaaggaaggccaagtaggcaaggcatgcaatctgttccatggaatggcacagcagggcgttgcgcctgacgtggtgacatataactcggttattgatgcactgtgcaaggccagagcaatggacaaggcggagtatttccttggtcagatggttgatagtggtgtcgtacctaacaatgtgacatataatagcctcatccatggatattcctcttcaggccattcaaaggaggcggtcagggtgctgaaagatatgacaagtaagggtatcataccagatgtttttacttgcaactcgctcatggcctccctttgcaagaatggaagaagcaaagaagctgcagaaatttttaattcaatgtccatgaagggcctgaaacctaacaccatttcatatgctattctccttcatgggtatgccactgaaggatgcttggttgacatgatcaatctcttcaattcaatggctacagactgtattctacctaactgtcatatcttcaacatactgattaatgcatatgctaaatatgggaagcttgataaggctatgcttatatttaaagatatgcagaaacaaggagtgagtccagatgcagtcacatattcaaccgtaatacatgcattttgcaaaaagggtaggttggatgatgctgtgataaagtttaatcagatgattgatacaggagtactactggaagcatctgtttatcgttccctaatccagggtttttgtacacatggcgatttggtgaaagcaacggaatatgttactgaaatgatgaagaaaggtatgcttcctcctgatattatgttcttcagttcaatcatgcagaacctatgcacagaaggaagggtaatagaagca

SEQ ID NO: 1986 - DNA, 2145 bp, Triticum aestivum
  source 1..2145: mol_type = genomic DNA
atgagccgccgccttgtccccgttggcagacgcatcttggagcagaacatcaaggcttggtaccacgccggagacattggcaccaaggacgcactccaccggtttgacgaattgctccaggatgctgggtcctcctcgatccgtgccgtcaactatctccttactgttgtcggacgtgattgccctgcgctcggcgtctccctcttcaaccgcgtcgcaagggccaaggtggcacccaacagtatcacgtacaccatcctcgtcgactgctgctgccgtgctggccgcttggacctcggtttcgctgccatgggccacatcattaagatgggatttacagcagacgcgatcttctctttcagccacctactaaagtccatatgtgcggagaagaagaccagctatgcaatggacatcgtactccgagtaatgcctgagcttaactgcacaccggacattttctcctatagcattcttttcaagggtctctgcaacgagaagagaagccaagaggctcttgagctgattcacatcatggttgaggatggaggttgctgccgacctgatgtggtgtcctatagcaccgtaattgatggcctgttgaaagagggtgaggtggacaaggcttacggcctattctgtgaaatgctacagaggggaatttcgccggatgatgtgacctataactcaatcatctctggcatgtgcaaggttcatgcgatggacaaggctgaggaggttcttcaacagatgtttgatagaggaattctgccagatgttgccacatataatagtctaatacatggatattattcattaggaaggtgcaaagaggttgatcggattttcaaggaaatgtctagaaatggtgttcaaccagatattgtaacttacaatatacagatggattatctttgcaagaatggaagatgcacagaagctaggaagatttttgattccatagtcagtttgggccaaaaaccgactgttactacctatagcattttgcttcatgggtatgctctggaacgatcttttcatgagatgcattgtctcattgatttgatggtgggaaatggtattgcgccagatcattttgtctacaacatactcatatctgcatatgctaaagaagaaatgattggtgaggtaatgcatatatttaaaaaaatgcggcagcatggattgaaccctgatgtagcgaactatggagcggtagtaaacttactttccaagattggccgaatggatgatgctatgtcccaattcaatcaaatgataactgaagggttagctcctgatatcataattttcaccccccttattagtggtttctgttcttgtggcaaatgggagaaggttcatgaactattttctgagatgttggatcgcggcatctgtcccaacacagtgttcttcaacacaattatggaccgcctttgcaaaaatggaagggttatggaagcccaagatctcttcgacctgatggtacacatgggtgtgaagcctgatgtgtgtacttataacaaactgacaggtggatacttgttcattggtaagatggatgaagtgagcaagctacttgacaatatggtctcaattggcatggaaccagatgttatcacctataacatactgattgatggttactctaagaatggaaagataaatgatgcattggttttttttagggaaatgttggaagggaaggttaagccttctgttatcatttttaatattatgattggtgtgttgcttaaatgtggcaggaaggaagaagccaaagatttgtttgatggtatctgggccaaaggattagtgcctgatgttgttacatatagcttaatgatacaaaagcttatagaagaaggttctctacaagagtctaatgatctattcctttctatggagaagaatggatgtgctgccgactcccgtatgctaaatgctatagttagaagcttacttcagaaaggggaggtgcccagggctgggacttatctgtctaaaattgatgagaggaggttcacccttgaagcttccactgctagcttgttgactgcacttgtgtcaggggggaaaggccaggaatataaagagttgctcccggaaaaataccactcgtttctggaacagggcactgat

SEQ ID NO: 1987 - DNA, 2145 bp, Triticum aestivum; identical to SEQ ID NO: 1986
  source 1..2145: mol_type = genomic DNA

SEQ ID NO: 1988 - DNA, 2145 bp, Triticum aestivum; identical to SEQ ID NO: 1986
  source 1..2145: mol_type = genomic DNA

SEQ ID NO: 1989 - DNA, 2145 bp, Triticum aestivum; identical to SEQ ID NO: 1986
  source 1..2145: mol_type = genomic DNA

SEQ ID NO: 1990 - DNA, 2145 bp, Triticum aestivum; identical to SEQ ID NO: 1986
  source 1..2145: mol_type = genomic DNA

SEQ ID NO: 1991 - DNA, 2145 bp, Triticum aestivum; identical to SEQ ID NO: 1986
  source 1..2145: mol_type = genomic DNA

SEQ ID NO: 1992 - DNA, 2199 bp, Triticum aestivum
  source 1..2199: mol_type = genomic DNA
atgcgccgccgccttgtcaccgtcggcagacgcatcttggagcagaaaattcaagaccggcaccgtgccggagacattggcagacgcatcttggagcagaacatcaaggctcggtaccacgctggagacattggcaccgaggatgcactcaacctgttcgacgaattgatccaggttgctcagccctcctcgatcagggccatcaactgcctgctcaccgttgttggccgtgattgccctgcgctcggcgtctccctcttcaaccgtgttgcaagagccaaggtgcctccacacaatatcacctatggcattctagtcgactgctgctgccgtgctggccgcttggaccttggacacgctgccatgggacacgtcattaagttgggatttacagcagaagctatcatcaatttcagccacctactcaaggccatctgtgcagtgaagaagaccagctatgcaatggacatcgtactccgagtaatgcctgagtttaactgcacaccgaacattttctcctacagcattcttttcaagggtctttgcaatgaaaggagaagccaagaggctcttgagctgattaatattatggttgaggatggaggtagctgccaacctgatgtggtgacctataacactgtaattgatggcttgttgaaagagggtgaggtggaccaagcttacagcctattttctgaaatgctgcgtcagggggtatcaccgaatgttgtgacatgtaattcaatcatctctggcatgtgcaagcttcacgcgatggacaaggctgaggaggttcttcaacagatgcttgatagacgaattctgccagatgttgccacatataatagtctgatacatggatattattcattaggacagtgcgaagaggtggatcggattttcaaggagatgactacaaatggtgttcaaccagatattgtaacttacaatatacagatggattatctttgcaagaatggaagatgcgcagaagctaggaagatttttgattccatgatcagtttgggccaaaaacctactgttactacctacaacattctgcttcatgggtatgctatggaaagatcttttcatgatatgaattgtctcattgagttgatggatgataatggtatttcaccagatcattatggctacaacatactcatatctgcttatgctaaagaaaaaatggttgatgatgtattgcatatatttacaaaaatgcggcagcaaggattgaaccctgatgttgcgaactatggagcggtaataaacttgctttctagtattggccgaatggatgacgctatgtcccaatacaatcaaatgataaatgaagggttagctcctgatatcatagttttcaactcccttattagtggtttctattcttgtggcaaatgggagaaggttcatgaactattttctgagatgttggatcgcggcatctgtcccaacacagtgttcttgaacacaattatggaccgcctttgcaaaaatgaaagggttatggaagcccaagatctcttcgacctgatggtacacatgggtgtgaagcctgatgtgtggacttataacacactgataggtggatacttgtttgttggtaagatggatgaagtgaggaagttacttgacaatatgtgctcaattggcatggaaccagatgttgtcacctatagcatactgattgatggttactctaagaatggaagaatagatgatgcatttgttgttttcaaggaattgttgggagggaaggttaagccttgtgttatcacttttactattatgattggtgcgttgcttaaatgtggcaggaaggaagaagccaaagatttgtttgatggtatctgggccaacggattagtgcccaacgttattacatatagcttaatgatacaaaaccttatagaagaaggttctctacaagagtctgatgatctattcctttctatggagaagaatgggtgtgctgctgactcacgtatgctaaatgctatagttagaaggttacttcagagaggggagatgccaagggctgggacttatctgtctaaaattgacgaggggagcttcacccttgaagcttccacagctggcttattgactgcgcttgcttcaggggggaaatgtcaggaatataaggggttactgcctgaaaaatatcactcttttctggaacagggcactggt

SEQ ID NO: 1993 - DNA, 2199 bp, Triticum aestivum; identical to SEQ ID NO: 1992
  source 1..2199: mol_type = genomic DNA

SEQ ID NO: 1994 - DNA, 2145 bp, Triticum aestivum
  source 1..2145: mol_type = genomic DNA
atgaggcgccgcctcgtccccgtcggcagccgcctctcggagcggaacatcgagcaccggtaccgctccagaaacattggtaccgaggacgcactcaacctgttcgacgaattgatccaggtcgctgggccttcctcggtccgcgccatcaactgcctcctcaccgtcgtcggccgtgattgccccgcaatcggcgtctccctgttcaaccgtgttgcaagagccaaggtgcctccccacaatatcacctatggcattctagtcgactgctgctgccgtgctggccgcttggaccttggacatgctggcatggggcacgtcattaagttgggatttgcagcagaagccatcgtcaatttcagccacctactcaaggccatatgtgcggagaagaagaccagctatgcaatggacattgtactccggataatgcctgaatttaactgcatcccgaacattttctcatacagcattcttttgaagggtctttgcaacgagaagaggagccaagaggctctcgagctgattcacatgatgattgaccatggaggtagctgccaacctaatgtggtgtcctatagcaccgtacttgatggcttgttgaaagagggtgaggtgggcaaggcctacagcctattttgtgtcatgctacagaggggaatttcgccgaatgctgtgacctgcacttcaatcatctctggcatgtgcaaagttcatgcgatggacaaggcagaggaggttcttcaacagatgactaatagaggtattctgccaaatagtgccacatataatagtctgatacatggatattattcattaggatggtgcaaagaggtggatcgaattttgaaggaaatgtctaaaaatggtgttcaaccagatattataacttccaatatacagttggattatctttgcaagagcagaagatgcgcagaagctaggaagatttttgattccatggtcagtttgggccaaaaaccagatgttactacctacagcatactgcttcatgggtatgctatggaaaaatcttttcatgatatgctttgtctcattgatttgatggtaggtaatggtattgcaccaaatcattatgtctacaacatactcatatctgcatatgctaaagaagaaatggttgatgaagtaatgcatatatttacaaaaatgcggcagaaaggattgaaccctgatgcagtgagctatggaacagtaatagacttactttccaggattggtcgaatggatgatgctatgtcccagttcgctcaaatcataactgaagggttagctcctgatatcatagttttcaactcccttattagtggtttctgttcttgtggcaaatgggagaaggttcatgaactattttctgagatgttggatcacggcatctgtcccgacagagtgttcttcaacactgttatggatcacctttgcaaaaatggaagggttatggaagcccaagatgtgttcgacctgatggtacacatgggtgtgaagccttttgtccgtgattacaacacactgatacatggatactgtttagttggtaagatggatgaagggaggaagttacttgacaatatgttctcaattggcttgaaaccggatgatttcacctatagcatactgattgatggttactctaagaagggaaggatagatgatgcattgattattgtcagggaaatgttggacgggaaggttaagccttctattatcacttttaatattatgattggtgcgttgctgaaaggtggcagaaaggaagaagccaaagatttgtttgatggtatctgggccaaaggattagtgcccgatgttgttacatatagcttaatgatacaaaaacttatagaagaaggttctctacaagagtctgatgatctattcatttctatggagaagaatggatgtgctgccgactcccagatgctaaatgctatagttagaagcttacttcagaaaggggaggtgccgagggctgggacttatctgtctaaaattgatgagaggaggttcacccctgaagcttccactgctagcttgttgactgcacttgtgtcagaggggaaaggccaggaatataaggagttactccctgaaaaatatcactcttttctggaacagggcactgat

SEQ ID NO: 1995 - DNA, 2142 bp, Triticum aestivum
  source 1..2142: mol_type = genomic DNA
atgaggcgccgcctcgtccccgtcggcagccgcctcttggagcggaacatcgagcaccggtaccgctccagaaacattggtaccgaggacgcactcaacctgttcgacgaattgatccaggtcgctgggccttcctcggtccgcgccataaactacctcaccgtcgtcggccgtgattgccccgcaatcggcgtctccctgttcaaccgtgttgcaagagccaaggtgcctccccacaatatcacctatggcattctagtcgactgctgctgccgtgctggccgcttggaccttggacatgctggcatggggcacgtcattaagttgggatttgcagcagaagccatcgtcaatttcagccacctactcaaggccatatgtgcggagaagaagaccagctatgcaatggacattgtactccggataatgcctgaatttaactgcatcccgaacattttctcatacagcattcttttgaagggtctttgcaacgagaagaggagccaagaggctctcgagctgattcacatgatgattgaccatggaggtagctgccaacctaatgtggtgtcctatagcaccgtacttgatggcttgttgaaagagggtgaggtgggcaaggcctacagcctattttgtgtcatgctacagaggggaatttcgccgaatgctgtgacctgcacttcaatcatctctggcatgtgcaaagttcatgtgatggacaaggcagaggaggttcttcaacagatgactgatagaggtattctgccaaatagtgccacatataatagtctgatacatggatattattcattaggatggtgcaaagaggtggatcgaattttgaaggaaatgtctagaaatggtgtccaaccaaatgttgtaacttacaatatacagttggattatctttgcaagagcagaagatgcgcagaagctaggaagatttttgattccatggtcagtttgggccaaaaaccagatgttactacctacagcatactgcttcatgggtatgctatggaaaaatcttttcatgatatgctttgtctcattgatttgatggtaggtaatggtattgcaccaaatcattatgtctacaacatactcatatctgcatatgctaaagaagaaatggttgatgaagtaatgcatatatttacaaaaatgcggcagaaaggattgaaccctgatgcagtgagctatggaacagtaatagacttactttccaggattggtcgaatggatgatgctatgtcccagttcgctcaaatcataactgaagggttagctcctgatatcatagttttcaactcccttattagtggtttctgttcttgtggcaaatgggagaaggttcatgaactattttctgagatgttggatcgcggcatctgtcccgacagagtgttcttcaacactgttatggatcacctttgcaaaaatggaagggttatggaagcccaagatgtgttcgacctgatggtacacatgggtgtgaagccttttgtccgtgattacaacacactgatacatggatactgtttagttggtaagatggatgaagggaggaagttacttgacaatatgttctcaattggcttgaaaccggatgatttcacctatagcatactgattgatggttactctaagaagggaaggatagatgatgcattgattattgtcagggaaatgttggacgggaaggttaagccttctattatcacttttaatattatgattggtgcgttgctgaaaggtggcagaaaggaagaagccaaagatttgtttgatggtatctgggccaaaggattagtgcccgatgttgttacatatagcttaatgatacaaaaacttatagaagaaggttctctacaagagtctgatgatctattcatttctatggagaagaatggatgtgctgccgactcccagatgctaaatgctatagttagaagcttacttcagaaaggggaggtgccgagggctgggacttatctgtctaaaattgatgagaggaggttcacccctgaagcttccactgctagcttgttgactgcactagtgtcagaggggaaaggccaggaatataaggagttactccctgaaaaatatcactcttttctggaacagggcactgat

SEQ ID NO: 1996 - DNA, 2142 bp, Triticum aestivum; identical to SEQ ID NO: 1995
  source 1..2142: mol_type = genomic DNA

SEQ ID NO: 1997 - DNA, 2145 bp, Triticum aestivum
  source 1..2145: mol_type = genomic DNA
atgaggcgccgcctcgtccccgtcggcagccgcctcttggagcggaacatcgagcaccggtaccgctccagaaacattggtaccgaggacgcactcaacctgttcgacgaattgatccaggtcgctgggccttcctcggtccgcgccatcaactgcctcctcaccgtcgtcggccgtgattgccccgcaatcggcgtctccctgttcaaccgtgttgcaagagccaaggtgcctccccacaatatcacctatggcattctagtcgactgctgctgccgtgctggccgcttggaccttggacatgctggcatggggcacgtcattaagttgggatttgcagcagaagccatcgtcaatttcagccacctactcaaggccatatgtgcggagaagaagaccagctatgcaatggacattgtactccggataatgcctgaatttaactgcatcccgaacattttctcatacagcattcttttgaagggtctttgcaacgagaagaggagccaagaggctctcgagctgattcacatgatgattgaccatggaggtagctgccaacctaatgtggtgtcctatagcaccgtacttgatggcttgttgaaagagggtgaggtgggcaaggcctacagcctattttgtgtcatgctacagaggggaatttcgccgaatgctgtgacctgcacttcaatcatctctggcatgtggaaagttcatgcgatggacaaggcagaggaggttcttcaacagatgactaatagaggtattctgccaaatagtgccacatataatagtctgatacatggatattattcattaggatggtgcaaagaggtggatcgaattttgaaggaaatgtctaaaaatggtgttcaaccagatattataacttacaatatacagttggattatctttgcaagagcagaagatgcgcagaagctaggaagattttttattccatggtcagtttgggccaaaaaccagatgttactacctacagcatactgcttcatgggtatgctatggaaaaatcttttcatgatatgctttgtctcattgatttgatggtaggtaatggtattgcaccaaatcattatgtctacaacatactcatatctgcatatgctaaagaagaaatggttgatgaagtaatgcatatatttacaaaaatgcggcagaaaggattgaaccctgatgcagtgagctatggaacagtaacagacttactttccaggattggtcgaatggatgatgctatgtcccagttcgctcaaatcataactgaagggttagctcctgatatcatagttttcaactcccttattagtggtttctgttcttgtggcaaatgggagaaggttcatgaactattttctgagatgttggatcacggcatctgtcccgacagagtgttcttcaacactgttatggatcacctttgcaaaaatggaagggttatggaagcccaagatgtgttcgacctgatggtacacatgggtgtgaagccttttgtccgtgattacaacacactgatacatggatactgtttagttggtaagatggatgaagggaggaagttacttgacaatatgttctcaattggcttgaaaccggatgatttcacctatagcatactgattgatggttactctaagaagggaaggatagatgatgcattgattattgtcagggaaatgttggacgggaaggttaagccttctattatcacttttaatattatgattggtgcgttgctgaaaggtggcagaaaggaagaagccaaagatttgtttgatggtatctgggccaaaggattagtgcccgatgttgttacatatagcttaatgatacaaaaacttatagaagaaggttctctacaagagtctgatgatctattcatttctatggagaagaatggatgtgctgccgactcccagatgctaaatgctatagttagaagcttacttcagaaaggggaggtgccgagggctgggacttatctgtctaaaattgatgagaggaggttcacccctgaagcttccactgctagcttgttgactgcacttgtgtcagaggggaaaggccaggaatataaggagttactccctgaaaaatatcactcttttctggaacagggcactgat

SEQ ID NO: 1998 - DNA, 2142 bp, Triticum aestivum; identical to SEQ ID NO: 1995
  source 1..2142: mol_type = genomic DNA

SEQ ID NO: 1999 - DNA, 1902 bp, Triticum aestivum
  source 1..1902: mol_type = genomic DNA
atgcctaccgcccgcctgtcctccgtctccgcctcctccttcaaggcttcttcacgaaaaccacgagcccccctcgccgccttggctgctgccacggagcgtgtgcgcgccggaacactaagccaggaggacgcgcaccacctgttcgacgaattgctaggccaagctgccatcgtcccggaacgcgggctgaacaactttcttgccgcactagctcgtgcaccgccctcaggtgcctgcggcgatggccccacccttgccgtcaccctcttcaatcgcatgtcccgaggcgctggtgcacgggtggtgtcgcccacactctgtacctattccatcctcatggactgctgctgccgcgcaggccgcccggacttggtggttgccttctttggccgcctcatcaggttggggctgcgtttggagatcatctccttcagcaatctcctcaaggggctctgccaggccaagtgttcaaatgaggctttggacatgctgctccaccggatgcccgaactagactgtgcgcctcatgtcgtctcgtacaacatagtaatcaacggctgttttaaacaaggtgaagtggagaaagcgtgcaatctctaccgtgagatgatcaacctgggagttcaacctaatgtggtgacctacagctcatttatcaacgcactaagcaagtccggagcaatggacaaggcagaagtggtccttcggcaaatggttgatcaaggcattgcacccaatatcattacgtatactagtctgatccatggatattccacttcgggtcagttgaaagcagcagttagtatattcaaagaaatggcaagtgctggtgttcgaccaaattctgtcacgttgaactcatttattgattccctttgcaagcatagaaagacaaaggaagctagagatatttttgactccatggccgcaaagggccacaaacctgatattttctcctactctactatgcttaatgggtatgcgaaagaaggatgcttcgatgatatgactgatctcttcaattcgatggtacggaatggtatcgtacctgaccaccatgttttcaacatactgatcaatgcatatgctaaacgtggactgatggataaggctatgcacatgttcgaagtaatgaggcaacaaggagtaaacccaaatgtagttgactatggtatacttcttaatggctactgtaaaattggaaggatcgcccatggattgagtcttttcagggaaatgtcactcagcggggttaagcccacgactattatgtacaacattatacttgatgggctgtttcgctccgggagatcagtttctgcaaaggaaaaattcgacatgatgcttgaaagtggcataccagtgaacgttcgcacatacaacatagttctctgtggactttgtaaaaacaattgcactggtgaagcaatggagctgttcaagaaattacgtgcaatgaacgtgcagattgatgtcatgatactcaatactatgatttctgcaatgtttaaaactaggagaattgaagaagccaaggatttgtttgctactatatcagccatcaggttggtgccttctgttgtgacttacagtgtaatgatgacgaatttcataaaagaagggttgctggcagatgctgatgatatgtttttagaaatggagaaggctggatgtgctcccaactccagtctgctaaatcaagtggtcagggcgttgctggaaaaaggtgcagttgtaaaggctgcaacttatctcgctaaacttgatgctaaacagctgtcagttgaagcttcaacgattttgttaatagtatctctcttctcaggggaagggaaactaagggagcacatagagttgcttccagtaaagtaccagcctcctgagagttcgactgacaat

SEQ ID NO: 2000 - DNA, 2187 bp, Triticum aestivum
  source 1..2187: mol_type = genomic DNA
atggtcccgccctcgccgtcgccctcttcaaccgcgtgtgccgagaacaagccggcccgcgggtggcacctcacagtccacacctacggcatcctcatggactgctgctgccgcgcgtctcgcccggacctagggcttgccttctttggtcgcctcctcaggacgggcctcaagacaaatgagatcgtcgccagcaccttcctcaagtgcctctgctacacgaaacggacagaagaggctgggaacttgctgcttcataggatgcccgagctctgctgtgtgcctgatgccttctcatacaacattgttctgaagagcttatgtgacaatagcatgagtcagcgggggcttgacctgctccagatgatggcgaaagaaggaggtggctgctctcccaacgtggtggcatatagcacggtcatccatggcttctttaaggagggcgaaacaggcaaggcatgcaatctcttccatgaaatgatgcagcaaggtgttgtgcccaatgtgtggacgtatagctcgattattgatgcattgtgcaaggccagagcaatggacaaggcagagctagcccttcagcagatggttgccaatggtgctcaacccaatgaagtgacatataattgcatgatccatgggtattccacatccgggcggttgaaagaggctgctaaaatgttcagagaaatgaaaagccggggtcttacaccaaatattgttacctgcggctcgttaatgacttccctttgcaagcatggaagaagcaaagaagctagagaaatatttgattccatgactgccaaaggccacagagctgatgtcgtctcatactctattttgcttcatgggtatgccaatgaaggatgctttgctgatatgattgatctctttaattcaatggaaagcaacggtattgcagccgactgccgtgtttttaccatattaattgatgcctatgctaaacgtggaatgatggatgatgcaatgcacatatttacggaaatgcagcaacaaggtgtgagtccaaatgttgtcacatattcaactgtaatatcagcactttctagaatgggtaggttgaccgattctatggaaaaatttaatcagatggttgccttgggagtacagccggatagagctatttatcggtccctaattcagggcttttgtatgcatggtggtttggttaaagataaggagttggtttctcaaatgataaacaaaggtattcctcgtcctagcattgtgttcttcaattcagtaataaacagtatgtgcaaggaaggaagggttatggatgcacatgatatctttgacttggttatagacattggtgagaggcctgatgacattacatttaattcactgattgacggatattgcttagtcgggaagatggataaagcatttaaaatactcgatgccatggaatcagttggtgttcagcctaatattgttacttacaacacacttcttgatggctattttaaaaatggaaggatcaatgatggtttgactctgtttagagaaatgccgcgtaagagaattaaacctgacactgttacatatggcatcatgttggatgggttgtttcgtgctgggagaactgttgctgcaaggacaatgttccatgagatgatcgaaagtggaataacagtggacatccccacatacaatatagttcttaggggactttctagaaataactgcacagatgaagcaatcgccctgttccagaaattaggtgcaatgagtgtgaagttcaatatttcaatatttaataccatgatcgatgcaatgtacaaggttcggagaagagaagaagccaatgatttatttgctgcaatatcagccagtgggttggtgcccaaggaatctacttatgcagtaatgataataaatcttctaaaacatggagcagtggaagaagcagacaatatgttttcatcaatggagaaaactggtatagtccccagctcccgtctattaaattgtatcatcagaatgttgttggaaataggtgagattgccaaggccggaaattacttgtctaaacttgatgggaacagcatctcactcgaagcttcaactacttcattgatgttgtctctgttttcaaagaaagggaaatatcatgaggacatgaaattgctccctgcaaagtatcaatttttcgatggatgtagt

SEQ ID NO: 2001 - DNA, 2148 bp, Triticum aestivum
  source 1..2148: mol_type = genomic DNA
atgttttctgttttcatttttgctttagttttttacgttcacctcgccatcgccctcttcaaccgcatgtgtcgagagcaatccggcccgcgggtggtgcctctcacagtccacacgtacaacatcctcatggactgctgctgccgcgcgtctcgcccggacctaggtcttgccttcttcgctcgcctcctcaggacaggcctgaagacaaacgagatcaccgccaacaccttcctcaagtgcctctgctacgcaagacggacggatgaggctctgaacgtgctgcttcataggatgttcgagctcggctgtgtgcctgatgccatctcatacaacattgttctgaagagcttatgtgaagatagcatgagtcagcgggcgctcgacctcctccagatgatggcgaaagaaggaggtggctgctcccccaacgtggtggcgtatagcacggtcatccatggcttttttaaggaaggtgaaacaggcaaggcatgcaatctgttccatgaaatgatgcaccaaggtgttgagcccagtgtgtggacatatagctcaatcattgatgcattgtgcaaggccagagcaatggacaaggcagagctagtgcttcagcagatggttaacaaaggtgttctacccaataatgtgacatataattgcatgatccatggatattccacatctgggcagtggaaagaggctgctaaattgcttagagaaatgaaaagccgggaccttataccagatattgtcactcgcaactcgttcctggcctccctttgcaagcatgggagaagcaaggaagctgcagaatttcttgattccatgactgccaagggccacaaaccagatatcgtatcataccgtattttgtttcatgggtatgccagtgaaggatgcttcgctgatatgattgatctctttaattcaatggaaagcaacggtattgcagctgactgccatgttttcaacatattaattagtggatatgcaaaacgtggaatgacagaagaagctatgctgatatttactgaaatgcggggacaaggagtgagtccagatgtagtcacctattccattgtaatagccgcactttccagaatgggtaggctgaccgatgctattgagaaattcaatgagatgactgccttggaagtacatccggacacaactgtttatcactcactgattcagggttgttgcatagacggtgatttggttaaagctaaggagctgatgcttgaaatgatgaacggtggtattcttcggcctaacattgtgttcttcaattcagtaataaatagtctgtgcaaagaaggaagggttatggatgcacatgatgtcttagacttggttataggcataggtgagaggcctgataccattacatttagttcactgattgacggatattgcttagtcgggaagacggataaagcattcaaaatacttgatgccatggaatcagttggtgttgagcctgatattgttacttacaatacactgcttgatggctattttaaaaacagaaggattgatgatgctttgactttgtttagagaaatgccgcgtaagagaattaaacctggcactgttacatatggcatcatgttggatgggttgtttcgtgctgggagaactgttgccgcaaagaaaatgttccatgagatgaacgggagtggaacaacggtggacatttccacatacgctataatacttggaggtttttgtagaaataattgtgcagacgaagctatcaccctgttccacaaattaggtgcaatgaatgtgaagttcaatattgcaatagtcaataccatgatcaatgcaatgtacaaggttgggagaagagaagaagctaaggaactatttgctggaatattagcccgtgggttggtgcctaatgaatctacttacggagtaatgataaaaaatcttctaaaagatggagcagtggaagatgctaacaatgtgttttcatcaatggacaagagtggtatagtccccagctcccgtctcatcaatgacatcatcagattgttgttggaaaaaggcaacgaaaaaaatagcgcgctacaaaatatagcgaggcccttctccaaatgctacacaagttatagcgcgctaatagcatgctatatttcgaaa

SEQ ID NO: 2002 - DNA, 2148 bp, Triticum aestivum
  source 1..2148: mol_type = genomic DNA
atgttttctgttttcatttttgctttagttttttacgttcacctcgccatcgccctcttcaaccgcgtgtgtcgagagcaatccggcccgcgggtggtgcctctcacagtccacacgtacaacatcctcatggactgctgctgccgcgcgtctcgcccggacctaggtcttgccttcttcgctcgcctcctcaggacaggcctgaagacaaacgagatcaccgccaacaccttcctcaagtgcctctgctacgcaagacggacggatgaggctctgaacgtgctgcttcataggatgtccgagctcggctgtgtgcctgatgccatctcatacaacattgttctgaagagcttatgtgaagatagcatgagtcagcgggcgctcgacctcctccagatgatggcgaaagaaggaggtggctgctcccccaacgtggtggcgtatagcacggtcatccatggcttttttaaggaaggtgaaacaggcaaggcatgcaatctgttccatgaaatgatgcaccaaggtgttgaacccagtgtgtggacatatagctcaatcattgatgcactgtgcaaggccagagcaatggacaaggcagagctagtgcttcagcagatggttaacaaaggtgttctacccaataatgtgacatataattgcatgatccatggatattccacatctgggcagtggaaagaggctgctaaattgcttagagaaatgaaaagccaggaccttataccagatattgtcactcgcaactcgttcctggcctccctttgcaagcatgggagaagcaaggaagctgcagaatttcttgattccatgactgccaagggccacaaaccagatatcgtatcataccgtattttgtttcatgggtatgccagtgaaggatgcttcgctgatatgattgatctctttaattcaatggaaagcaacggtattgcagctgactgccatgttttcaacatattaattagtggatatgcaaaacgtggaatgacagaagaagctatgctgatatttactgaaatgcggggacaaggagtgagtccagatgtagtcacctattccattgtaatagccgcactttccagaatgggtaggctgaccgatgctattgagaaattcgatgagatgactgccttggaagtacatccggacacaactgtttatcactcactgattcagggttgttgcatagacggtgatttggttaaagctaaggagctgatgcttgaaatgatgaacggtggtattcttcggcctaccattgtgttcttcaattcagtaataaacagtctgtgcaaagaaggaagggttatggatgcacatgatgtcttagacttggttataggcataggtgagaggcctgataccattacatttagttcactgattgacggatattgcttagtcgggaagacggataaagcattcaaaatacttgatgccatggaatcagttggtgttgagcctgatattgttacttacaatacactgcttgatggctattttaaaaacagaaggattgatgatgctttgactttgtttagagaaatgccgcgtaagagaattaaacctggcactgttacatatggcatcatgttggatgggttgtttcgtgctgggagaactgttgccgcaaagaaaatgttccatgagatgaacgagagtggaacaacggtggacatttccacatacgctataatacttggaggtttttgtagaaataattgtgcagacgaagctatcaccctgttccacaaattaggtgcaatgaatgtgaagttcaatattgcaatagtcaataccatgatcaatgcaatgtacaaggttgggagaagagaagaagctaaggaactatttgctggaatattagcccgtgggttggtgcctaatgaatctacttacggagtaatgataaaaaatcttctaaaagatggagcagtggaagatgctaacaatgtgttttcatcaatggacaagagtggtatagtccccagctcccgtctcatcaatgacatcatcaaattgttgttggaaaaaggcaacgaaaaaaatagcgcgctacaaaatatagcgaggcccttctccaaatgctacacaagttatagcgcgctaatagcatgctatatttcgaaa

SEQ ID NO: 2003 - DNA, 2148 bp, Triticum aestivum; identical to SEQ ID NO: 2001
  source 1..2148: mol_type = genomic DNA

SEQ ID NO: 2004 - DNA, 2148 bp, Triticum aestivum; identical to SEQ ID NO: 2001
  source 1..2148: mol_type = genomic DNA

SEQ ID NO: 2005 - DNA, 2148 bp, Triticum aestivum; identical to SEQ ID NO: 2002
  source 1..2148: mol_type = genomic DNA

SEQ ID NO: 2006 - DNA, 2148 bp, Triticum aestivum; identical to SEQ ID NO: 2001
  source 1..2148: mol_type = genomic DNA

SEQ ID NO: 2007 - DNA, 2199 bp, Triticum aestivum
  source 1..2199: mol_type = genomic DNA
atgtcccgcctccgccactccacctccaccgcgccgatgtttcacctccgcctcctccgctgccgcttctcctccatccccatctctccgccctcgcgctcatggtctcccgtcaccgcctttgccgcggccacagagcgcgtcagcgctgggacgctcagcccggaagacgcacaccgcctgttcgacgaattgctacggcaggccactccggtccccgcgcgctccctgaacggcttacttacggccctctcccgtgcgccggacaccggcgcctgcagagacggccccgccctcgccctcgccctcttcaaccgcacccgccgagaagaggccggctcctgggtggtgccgtccacaatcttcacctacggcatcctcatgaactgctgctgccgcacgcgtcgtccggaacttgggcttgccttctttgggcgcgtcctcaggatgggcctgaggacaaacgtggtcgtcgccaccacggtcctccagtgcctgtgcggcgccaaacggacagatgaggctgtggacatcctgctacatcggatgtccgagctcgggtgcgtgcctgacgacttctcatacaacattgttctgaagagcttatgcgatgatagcaggagccagcgggcactcgacctgctccggatgtgggagaatgaacgaggtgtctgctcccccaacgtatatacgtataacacggtcatccacggcttctttaaggaaggtgaagtaagcaaggcatgtaacctattccatgaaatggcgcagaaaggggttccgcccaatgtggtgacatatagcttgactattgatgcgctgtgcaaggccagagctatggacaaagcacagttgttcctccggcagatgattcataaaggtgttcgaccgaacaatgtgacatataatgtcatgatccatggatattgcactctgggacagtggaaggaagcgggtaaaatgttcagagaaatgacaagacagggtctcataccagatattgttacttggacctcgttcatggcctctctctgtaagcatggaagaaccaaagaagctgccgaattctttgattccatgactgccaagggccacaagcctgatttggtcatgtatcatgttctgctccatgggtatgcaaccgaaggatgctttgctgatatgattaatctctttaattcaatggcaaccaaaggtattgtacccgatcgtcaggttttcaacattttaattgatgcacatgctaaacatggaatgatggatgaagctatgcacatatttactggaatgcagggacaaggagtgtgtccagatgtagggacctattcaactctaatatctgcactttgcagaatgggtaggctggctgatgccatggataacttcagtcagatgattggtaagggagtacaaccgaacacagttgtttatcactccctaattcagggtttctctacacatggtgatttgaggaaagcaaaggagttggtttatgaaatgacgaataaaggtattccttgtccaaacattgcattcttcagttctataatggacagtctatgcaaagaaggaagggttatggatgcacatgatatcttccacttggttacagacataggtctgaaacctaacatcattacgtttaatacgctgattgatggacattgcttagtcggtgagatggagaaagcatttggagtacttgattccatggtatcagctggcattgaggctgatgtttttacatataatacacttgcttatggctattgtagatgtggaaggattgatgatgggttgattctattcagagaaatgttgcaaaacaaacctaaacccacaacaatcacatataacatcatactggatgggttatttcgtgctgggagaacatttgctgcaaagaaaatgttccttgagatgattgaaacgggaataacagtgagcatttccacatacagtataatacttggaggactttgtaggaataattgctctgacgaagcgatcaccctatttcagaaattaggagcaatgaatgtgaagtttgatattaaaatactcactaccatgatcaatgccatgttcaaggtttggagaagagaagaagctaacggtttgtttgctgcaatatcagccagtgggatggtacctaatgctgataggaaatcttctaaaagaaggatcagtggaagaagc

SEQ ID NO: 2008 - DNA, 2199 bp, Triticum aestivum
  source 1..2199: mol_type = genomic DNA
atgtcccgcctccgccactccacctccaccgcgccgatgtttcacctccgcctcctccgctgccgcttctcctccatccccatctctccgccctcgcgctcatggtctcccgtcaccgcctttgccgcggccacagagcgcgtcagcgctgggacgctcagcccggaagacgcacaccgcctgttcgacgaattgctacggcaggccactccggtccccgcgcgctccctgaacggcttacttacggccctctcccgtgcgccggacaccggcgcctgcagagacggccccgccctcgccctcgccctcttcaaccgcacccgccgagaagaggccggctcctgggtggtgccgtccacaatcttcacctacggcatcctcatgaactgctgctgccgcacgcgtcgtccggaacttgggcttgccttctttgggcgcgtcctcaggatgggcctgaggacaaacgtggtcgtcgccaccacggtcctccagtgcctgtgcggcgccaaacggacagatgaggctgtggacatcctgctacatcggatgtccgagctcgggtgcgtgcctgacgacttctcatacaacattgttctgaagagcttatgcgatgatagcaggagccagcgggcactcgacctgctccggatgtgggagaatgaacgaggtgtctgctcccccaacgtatatacgtataacacggtcatccacggcttctttaaggaaggtgaagtaagcaaggcatgtaacctattccatgaaatggcgcagaaaggggttccgcccaatgtggtgacatatagcttgactattgatgcgctgtgcaaggccagagctatggacaaagcacagttgttcctccggcagatgattcataaaggtgttcgaccgaacaatgtgacatataatgtcatgatccatggatattgcactctgggacagtggaaggaagcgggtaaaatgttcagagaaatgacaagacagggtctcataccagatattgttacttggacctcgttcatggcctctctctgtaagcatggaagaaccaaagaagctgccgaattctttgattccatgactgccaagggccacaagcctgatttggtcatgtatcatgttctgctccatgggtatgcaaccgaaggatgctttgctgatatgattaatctctttaattcaatggcaaccaaaggtattgtacccgatcgtcaggttttcaacattttaattgatgcacatgctaaacatggaatgatggatgaagctatgcacatatttactggaatgcagggacaaggagtgtgtccagatgtagggacctattcaactctaatatctgcactttgcagaatgggtaggctggctgatgccatggataacttcagtcagatgattggtaagggagtacaaccgaacacagttgtttatcactccctaattcagggtttctctacacatggtgatttgaggaaagcaaaggagttggtttatgaaatgacgaacaaaggtattccttgtccaaacattgcattcttcagttctataatggacagtctatgcaaagaaggaagggttatggatgcacatgatatcttccacttggttacagacataggtctgaaacctaacatcattacgtttaatacgctgattgatggacattgcttagtcggtgagatggagaaagcatttggagtacttgattccatggtatcagctggcattgaggctgatgtttttacatataatacacttgcttatggctattgtagatgtggaaggattgatgatgggttgattctattcagagaaatgttgcaaaacaaacctaaacccacaacaatcacatataacatcatactggatgggttatttcgtgctgggagaacatttgctgcaaagaaaatgttccttgagatgattgaaacgggaataacagtgagcatttccacatacagtataatacttggaggactttgtaggaataattgctctgacgaagcgatcaccctatttcagaaattaggagcaatgaatgtgaagtttgatattaaaatactcactaccatgatcaatgccatgttcaaggtttggagaagagaagaagctaacggtttgtttgctgcaatatcagccagtgggatggtacctaatgctgataggaaatcttctaaaagaaggatcagtggaagaagc

SEQ ID NO: 2009 - DNA, 2199 bp, Triticum aestivum; identical to SEQ ID NO: 2008
  source 1..2199: mol_type = genomic DNA

SEQ ID NO: 2010 - DNA, 2199 bp, Triticum aestivum; identical to SEQ ID NO: 2008
  source 1..2199: mol_type = genomic DNA

SEQ ID NO: 2011 - DNA, 2199 bp, Triticum aestivum
  source 1..2199: mol_type = genomic DNA
atgtcccgcctccgccactccacctccaccgcgccgatgtttcacctccgcctcctccgctgccgcttctcctccatccccatctctccgccctcgcgctcatggtctcccgtcaccgcctttgccgcggccacagagcgcgtcagcgctgggacgctcagcccggaagacgcacaccgcctgttcgacgaattgctacggcaggccactccggtccccgcgcgctccctgaacggcttacttacggccctctcccgtgcgccggacaccggcgcctgcagagacggccccgccctcgccctcgccctcttcaaccgcacccgccgagaagaggccggctcctgggtggtgccgtccacaatcttcacctacggcatcctcatgaactgctgctgccgcacgcgtcgtccggaacttgggcttgccttctttgggcgcgtcctcaggatgggcctgaggacaaacgtggtcgtcgccaccacggtcctccagtgcctgtgcggcgccaaacggacagatgaggctgtggacatcctgctacatcggatgtccgagctcgggtgcgtgcctgacgacttctcatacaacattgttctgaagagcttatgcgatgatagcaggagccagcgggcactcgacctgctccggatgtgggagaatgaacgaggtgtctgctcccccaacgtatatacgtataacacggtcatccacggcttctttaaggaaggtgaagtaagcaaggcatgtaacctattccatgaaatggcgcagaaaggggttccgcccaatgtggtgacatatagcttgactattgatgcgctgtgcaaggccagagctatggacaaagcacagttgttcctccggcagatgattcataaaggtgttcgaccgaacaatgtgacatataatgtcatgatccatggatattgcactctgggacagtggaaggaagcgggtaaaatgttcagagaaatgacaagacagggtctcataccagatattgttacttggacctcgttcatggcctctctctgtaagcatggaagaaccaaagaagctgccgaattctttgattccatgactgccaagggccacaagcctgatttggtcatgtatcatgttctgctccatgggtatgcaaccgaaggatgctttgctgatatgattaatctctttaattcaatggcaaccaaaggtattgtacccgatcgtcaggttttcaacattttaattgatgcacatgctaaacatggaatgatggatgaagctatgcacatatttactggaatgcagggacaaggggtgtgtccagatgtagggacctattcaactctaatatctgcactttgcagaatgggtaggctggctgatgccatggataacttcagtcagatgattggtaagggagtacaaccgaacacagttgtttatcactccctaattcagggtttctctacacatggtgatttgaggaaagcaaaggagttggtttatgaaatgacgaacaaaggtattccttgtccaaacattgcattcttcagttctataatggacagtctatgcaaagaaggaagggttatggatgcacatgatatcttccacttggttacagacataggtctgaaacctaacatcattacgtttaatacgctgattgatggacattgcttagtcggtgagatggagaaagcatttggagtacttgattccatggtatcagctggcattgaggctgatgtttttacatataatacacttgcttatggctattgtagatgtggaaggattgatgatgggttgattctattcagagaaatgttgcaaaacaaacctaaacccacaacaatcacatataacatcatactggatgggttatttcgtgctgggagaacatttgctgcaaagaaaatgttccttgagatgattgaaacgggaataacagtgagcatttccacatacagtataatacttggaggactttgtaggaataattgctctgacgaagcgatcaccctatttcagaaattaggagcaatgaatgtgaagtttgatattaaaatactcactaccatgatcaatgccatgttcaaggtttggagaagagaagaagctaacggtttgtttgctgcaatatcagccagtgggatggtacctaatgctgataggaaatcttctaaaagaaggatcagtggaagaagc

SEQ ID NO: 2012 - DNA, 2199 bp, Triticum aestivum; identical to SEQ ID NO: 2011
  source 1..2199: mol_type = genomic DNA

SEQ ID NO: 2013 - DNA, 2148 bp, Triticum aestivum
  source 1..2148: mol_type = genomic DNA
atgagccgccgccttgtccccgtcggcagacgcatcttggagcagaacatcaaggaccggtaccgcaccggacacattggcaccgaggatgcactccagctgtttgacgaattgctccaggttgctcagccctcctcgattgctgccatcaactgcctcctcactgtcgtcggccgtgattgccctgcgctcggcgtctcgctcttcaaccgcgtcgcaaggtccaaggtggcgcccagcagtatcacctatgccattctggtcgactgctgctgccgcgctggccgccaggaccttggacacactgccatgggacacgtcatcaagatgggatttcttgcagatgctattatcactttcagccacctactaaaggccatctgtgcggagaacaagaccagctacgcaatggacatcgtactccgagtaatgcccatgtttaactgtgttccgagcattttctcctacagcattcttttcaagggtctctgcaatgagaggagaagccaagaggctcttgagctgattaacattatggttgaggatggacgaggtagctgccaacctaatgtcgtgtcctataccaccgtaattgatggcttgttgaaagagggtgaggtgggcaaggcctacagcctattttgtgtcatgctacagaggggaatttcgccgaatgttgtgacctgcacttcaatcatctctggcatgtgcaaagttcatgcgatggacaaggcagaggaggttcttcaacagatgactaatagaggtattctgccaaatagtgccacatataatagtctgatacatggatattattcattaggacagtgcgaagaggtggatcggattctcatggaaatgtctagaaatggtgttcaaccaaatgttgtaacttacaatatacagatggattatctttgcaagagcggaagatgtgcagaagctaggaagatttttgattctatgatcagtttgggcccaaaaccgaccattactacctacaacattctgcttcatgggtatgctatggaaaaatcttttcatgatatgcattctctcattgatttgatggtaggaaatggcattgcaccagatcattatgtctacaacatactcatatctgcatgtgctaaagaagaaatggttagtgaggtaatgcatatatttaaaaaaatgcggcagcatgggttgaaccctgatgtagcgacctatggagcggtagtaaacttgctttgcagcatgggccgaatggatgatgctatgtaccaatacaatcaaatgataaccgaaggattagctcctgatatcatagttttcagcacccttataagtggtttctgtacttgtggcaaatgggagaaggttcatgaactattttctgagatgttggatcgcggtatctgtcccaacacagtgttcttcaccacaattatggaccgcctttgcaaaaacggaagggttatggaagcccaagatctcttcgacctgatggtacacatgggtgtgaagcctgatgtgtgtacttataacacactgataggtggattcttgttcattggtaagatggatgaagtgaggaagttacttgacaatatggtctcaattggcatgaaaccagatgttatcacctataacatactgattgatggttactgtaagaatggaaggatagatgatgcattggttgttttcagggaaatgttggccgggaaggttaagccttgcattatcacttttaatattatgcttggtgcgttgcttaaaggtggcaggaaggaagaggctaaagatttgtttgatggtatctgggccaaaggattagtgcccaccgttgttacatatagcttaatgatacaaaaacttatagaagaaggatctctacaagagtctgatgatctattcctttctatggagaagaatggttgtcctgccaattcccgcatgctaaatgctatagttagaaggttacttcagaaaggggagatgcccagggctgggacttatttgtctaaaattgatgagaggagtttcaccattgaagcttccacagctagcttgttgactgcacttgcttcagtggggaaatgtcaggaatataaggggttactgcctgaaaaatatcactcttttctggaacagggcactgat

SEQ ID NO: 2014 - DNA, 2148 bp, Triticum aestivum
  source 1..2148: mol_type = genomic DNA
atgagccgccgccttgtccccgtcggcagacgcatcttggagcagaacatcaaggaccggtaccgcaccggacacattggcaccgaggatgcactccagctgtttgacgaattgctccaggttgctcagccctcctcgattgctgccatcaactgcctcctcactgtcgtcggccgtgattgccctgcgctcggcgtctcgctcttcaaccgcgtcgcaaggtccaaggtggcgcccagcagtatcacctatgccattctggtcgactgctgctgccgcgctggccgccaggaccttggacacactgccatgggacacgtcatcaagatgggatttcttgcagatgctattatcactttcagccacctactaaaggccatctgtgcggagaacaagaccagctacgcaatggacatcgtactccgagtaatgcccatgtttaactgtgttccgagcattttctcctacagcattcttttcaagggtctctgcaatgagaggagaagccaagaggctcttgagctgattaacattatggttgaggatggacgaggtagctgccaacctaatgtcgtgtcctataccaccgtaattgatggcttgttgaaagagggtgaggtgggcaaggcctacagcctattttgtgtcatgctacagaggggaatttcgccgaatgttgtgacctgcacttcaatcatctctggcatgtgcaaagttcatgcgatggacaaggcagaggaggttcttcaacagatgactaatagaggtattctgccaaatagtgccacatataatagtctgatacatggatattattcattaggacagtgcgaagaggtggatcggattctcatggaaatgtctagaaatggtgttcaaccaaatgttgtaacttacaatatacagatggattatctttgcaagagcggaagatgtgcagaagctaggaagatttttgattctatgatcagtttgggcccaaaaccgaccattactacctacaacattctgcttcatgggtatgctatggaaaaatcttttcatgatatgcattctctcattgatttgatggtaggaaatggcattgcaccagatcattatgtctacaacatactcatatctgcatgtgataaagaagaaatggttagtgaggtaatgcatatatttaaaaaaatgcggcagcatgggttgaaccctgatgtagcgacctatggagcggtagtaaacttgctttgcagcatgggccgaatggatgatgctatgtaccaatacaatcaaatgataaccgaaggattagctcctgatatcatagttttcagcacccttataagtggtttctgtacttgtggcaaatgggagaaggttcatgaactattttctgagatgttggatcgcggtatctgtcccaacacagtgttcttcaccacaattatggaccgcctttgcaaaaacggaagggttatggaagcccaagatctcttcgacctgatggtacacatgggtgtgaagcctgatgtgtgtacttataacacactgataggtggattcttgttcattggtaagatggatgaagtgaggaagttacttgacaatatggtctcaattggcatgaaaccagatgttatcacctataacatactgattgatggttactgtaagaatggaaggatagatgatgcattggttgttttcagggaaatgttggccgggaaggttaagccttgcattatcacttttaatattatgcttggtgcgttgcttaaaggtggcaggaaggaagaggctaaagatttgtttgatggtatctgggccaaaggattagtgcccaccgttgttacatatagcttaatgatacaaaaacttatagaagaaggatctctacaagagtctgatgatctattcctttctatggagaagaatggttgtcctgccaattcccgcatgctaaatgctatagttagaaggttacttcagaaaggggagatgcccagggctgggacttatttgtctaaaattgatgagaggagtttcaccattgaagcttccacagctagcttgttgactgcacttgcttcagtggggaaatgtcaggaatataaggggttactgcctgaaaaatatcactcttttctggaacagggcactgat

SEQ ID NO: 2015 - DNA, 2148 bp, Triticum aestivum; identical to SEQ ID NO: 2014
  source 1..2148: mol_type = genomic DNA

SEQ ID NO: 2016 - DNA, 2148 bp, Triticum aestivum; identical to SEQ ID NO: 2014
  source 1..2148: mol_type = genomic DNA

SEQ ID NO: 2017 - DNA, 1836 bp, Triticum aestivum
  source 1..1836: mol_type = genomic DNA
atgggacacgtcattaagttgggatttacagcagaagctatcgtcaatttcagccacctactcaaggccatctgtgcagtgaagaagaccagctatgcaatggacatcgtactccggataatgcctgagtttaactgcataccaaacattttctcctataacattcttttcaagggtctctgcaacgagaagagaagccaagaggctctcgacctgattcgcatcatggttgagcatggaggttgctgccaacctgatgtggtgacctataacactgtaatcgatggcttgttgaaagagggtgaggtaggcaaggcttacagcctattttgtgaaatgctgcgtcagggggtatcgccggatgttgtgacctgtagttcgattatctctggcatgtgcaagcttcatgcaatggacaaggctgaggaggttcttcaacagatgcttgatagaagaattctgccagatgttgccacatataatagtctgatacatggatattattcattaggacagtgcgaagaggtggatcggattttcaaggagatgactacaaatggtgttcaaccagatattgtaacttacaatatacagatggattatctttgcaagaatggaagatgcgcagaagctaggaagatttttgattctatgatcagtttgggccaaaaacctactgttactacctacaacattctgcttcatgggtatgctatggaaagatcgtttcatgatatgaattgtctcattgagttgatggatgataatggtatttcaccagatcattatggctacaacatactcatatctgcttatgctaaagaaaaaatggttgatgatgtattgcatatatttacaaaaatgcggcagcaaggattgaaccctgatgttgcgaactatggagcggtaataaacttgctttctagtattggccgaatggatgatgctatgtcccaatacaatcaaatgataaatgaaggattactccctggtatcatacttttcagccaacttattagtggtttctgttcttgtggcaaatgggagaaggttcatgaactattttctgagatgttggatcgcggcatctgtcccaacacagtgttcttcaacacaattatcgaccgcctttgcaaaaacggaagggttatggaagcccaagatctcttcgacctgatggtacacatgggtgtgaagcctgatgtgtgtaattataacacattgataggtggatacttgttcattggtaagatggatgaagtgagcaagttacttgacaatatgtgctcaattggcttgaacccaaatgttttcacctatggcatactgatcgatggttactctaagaatggaagtataggtgatgcattggttgtttttagggaaatgttggaagggaaggttaagccttctattatcagttttaatattatgattggtgcgttgcttaaatgtggcaggaaggaagaagccaaagatttgtttgatggtatctgggccaacgtattagtgcctgatgttgttacctatagattaatgatacacaaacttatagaagaaggttctctacaagagtctgatgatctatttgtttctatggagaaggatggctgtgctgccgactcccgtatgctaaatgccatagttagaaggttacttcagaaaggggagatgccaagagctgggacttatctgtctaaaattgatgagaggaggttcacccttgaagcttccactgctagcttgttgactgcacttgtgtcaggggggaaaggccaggaatataaagagttactccccaaaaaataccaatcttttctggaacagggcactgat

SEQ ID NO: 2018 - DNA, 2142 bp, Triticum aestivum
  source 1..2142: mol_type = genomic DNA
atgagccgccggcttgtccccgtcggtagacgcatcttggagaggaaaattgaagaacggtactgtgccggagacattggcactgacgatgcactcaacctgttctacgaattgatccaggttgctcggccttcctcgatccgtgccattaactgcctcctcaccgtggtccgccgtgattgccctgcgctcggcgtttccctcttcaaccgtgttgcaagagccaaggtgcctccacacaatatcacctatggcattctagtcgactgctgctgccgtgctggccgcttggaccttggacacgctgccatgggacacgtcattaagttgggatttgcagcacaagctgtcgtcaatttcagccacctactcaaggccatctgtgcggagaagaagaccagctatgcaatggacatcgtactccgagtaatccccatgtttaactgcgtgccggatgtcttctcctacagcattcttttcaagggtctttgcaacgaaaggagaagccaagaggctcttgagctgattcacatcatggtacagcatggaggtagctgccaacctaatgtggtgtcctatagcaccgtaattgatggcttgttgaaagagggtgagatgaacaaggcttacagtctattttgtgaaatgttacagaggggaatttcgccgaatgttgtgacctgtagttcaattatctctggcatgtgcaagcttcatgcaatggacaaggctgaggaggttcttcaacagatgcttgatagaggaattctgccaaatagtaccacatataatggcctgatacatgggtattattcactagaacagtgcgaagaggtgggtcggattttcaaggaaatgtctagaaatggtgttcaaccaaatattgtaacttacaatatacagatggattatctttgcaagagcggaagatgcgcagaagctaggaagatttttgattctatggtcagtttgggccaaaaaccagatgttactacctacggcattctgcttcatgggtatgctatggaacgatcttttcatgatattcattgtctcattgatttgatggtcggaaatggtctgtcaccaaataactatatctacagcatactcatatctgcatgtgctaaagaaaaaatggttgatgaggcaatgcatatatttacaaaaatgcggcagcaaggatttaaccctgatgtagtgagctatggaatggtgatagacttgctttccagtattggccgaatggatgatgctatgtcccagttcaatcaaatgataaccgaagggttagctcctgatatcatagttttcaacccccttattagtggtttctgttcttgtggcaaatgggagaaggttcatgaactattttctgagatgttggatcgcagcatctgtcccgacagagtgttcttcaacactgttatggatcacctttgcaaaagtgaaagggttatggaagcccaagatgtgcttgacctgatgatacatatgggtgtgaagcctgttgttcgtgattacaacagactgatacatggatattttttagttggtaagatggatgaagggaggaagttacttgacaatatgtgctccattggcttgaaaccgaatgttgtcacctataacatactgatagatggttactctaagaatggaaggatagatgatgcattggttgttttcagggaaacgttggacaatgttaaggtttctgttatcacttttactattatgatcggtgcgttgcttaaatgtggcagaaaggaagaagccaaagacatgtttgatggtatctgggccaacggattagtgcctgacgttgttacatatagcttaatgatacaaaaacttatagaagaaggttctctacaagagtctgatgatctattcatttctatggagaagaatggatgtgctgccgattcccgtttgctaaacgctatagttagaagcttacttcagaaaggggagattcttagggctgggacttatctgtctaaaattgatgagaggagcttcacccttgaagcttccacagctagtttgttgactgcacttgcttcaggggggaaaggccaggaatataaggagttactccctgaaaaataccactcttttctggaacagggcacggat

SEQ ID NO: 2019 - DNA, 2142 bp, Triticum aestivum; identical to SEQ ID NO: 2018
  source 1..2142: mol_type = genomic DNA

SEQ ID NO: 2020 - DNA, 2172 bp, Triticum aestivum
  source 1..2172: mol_type = genomic DNA
atgggtttgggaaggcaaaacccgatgggtttcgtccccgttgccatctggagccgcactagcccgtgctccgccctcagctgcctgcagcgatggccccggccttgccgtcaccctcttcaaccgcatgtgccgaggcgctggtgcactcgtgtggtctcgcccacgtgttgtacctattccatcctcatggactgctgctgccgcgcagaccgcccggacttggtggttgccttcttcggccacctcctcaggctggggctgcgcctgaatgtcatctccttcaacaacctcctcaaggggctctgccaggccaagcgctcaaatgaggcggtggacttgctgctccaccggacacctgaactggactctgtgcctaatgtcttctcgtacggcatcgtaatcaacggctgttttaaacaaggtgaagtagacaaagcgtgcaatctcttccatgagatgatccaactaggagttcaacctaatgtggtgatctacacctcaattatcgatgcactaagcaagtgcggagccatggataaggcagaagtggtccttcagcaaatggttgatcaaggcattgaacccaacatcaggacatatactagcctggtacatggatattccgcttcgggtcagtggaaggcggcagttagagtattcaaggaaatggtaagtgttggtattctaccaaatgctttcactttgaactcatttatggattcactttgcaagcatagaaggacaaaggaagctagagttatttttgactccatggctgcaaagggccaaaaacctaatatcgtctcctactctactatgcttaacgggtatgcgaaagaaggatgcttcgatgatatgacttgtttcttgaatttgatgctacagaatggtgttgtacctgatcaccatgttttcaacatattgattaatgcatgtgctaaacgtggactgatggatgaggctatgcacatgtttgaagtaatgaggcaacaaggagtaaacccagatgtatttggctatcaaatcataatggattcactttgcaaaaagggtaagatggatgctgctctggagaaatttaatcagatggtcaatgaaggagtttcacctaacaaagctgtttaccaatgcctggttctgggttcttgctctcatgatcattttctgaaagccaaggaattgatttctgaagcagttaatagaggtctgtgttctaacagtgcgttcttctatcctgtaataaacgacctgtgcaaagaaggaaaggtgaaggaggcacaggatatgtttgacttcattgtaggtattggtcagcggcctgatgtgattatgtacaattcactgatggatggatattgccttgttggcaaagtggaggaagcactgagagtacttgatgctatgaagtctgctggcctccaacctactgctgttacgtatgatatacttcttaatggctactgtaaaattggaaggattgccgctggattgagtcttttcatggaaatgtcactcagcggggttaagcccactactattatgtacaacattatacttgatgggctgtttcgctccgggagaacagattctgcaaaggaaaaattccgtacgatgagcgaaagtggcataccagtgggcattggcacatacaacatagttcttagtggactttgtaaaaataattgcactggtgaagcaatagagctgttcaagaaactacgtgcaatgaatgtgaagattgatgtcaaaacactcactatcatgatttctgcaatgtttaaaagtaggagaattgaagaagccaaggagttgtttgctactatatcagccatcgggttggtgccttctgttgtgacttacagtgtaatgatgacgaatttcataaaagaagggtcgctggcagaggctgatgatatgtttttagcaatggagaaggctagctgtgctcccaactccatgctgctaaatcaagtggtcagggcgttgctgaaaaaaggtgcagttgtgaaggctgcaacttatctcgctaaacttgatgctaaacagctgtcagttgaagcctcaatgatttcgttaatagtatttctcttctcaggggaagggaaactaagggagcacgtagagttgcttccagtaaagtaccagcctcctgagagttcggctgacaat

SEQ ID NO: 2021 - DNA, 2145 bp, Triticum aestivum
  source 1..2145: mol_type = genomic DNA
atgagccgccgcgtcgtccccgtcggcagacgcatcttggagcagaacatcaaggctcggtaccacgccggagacattggcaccgaggacgcactccacctgtttgacgaattgctccaggatgctgggcgctcctcgatccatgccatcaactgcctcctcaccgttgtcggccgtgattgccctgcgctcggcgtctccctcttcaaccgcgtcgcaaggtccaaggtggcgcccagcagtatcacctatgccattctggtcgactgctgctgccgcgctggccgccaggaccttggacacactgccatgggacacgtcatcaagatggggtttcttgcagatgccattatcactttcagccacctgctaaaggccatctgtgcggagaacaagaccagctacgcaatggacatcgtactccggataatgcccgagtttaactgcatgccaaacattttctcctacaacattcttttcaagggtctctgcaatgagaagagaagccaagaggctcttgagctgattcaaattatggttgaggatggaggttgctgccgacctgatgtggtgacctatagcactgtaattgatggcttgttgaaagagggtgaggtaggcaaggcttacagcctattttgtgaaatgctgcgtcagggggtatcgccggatattgtgacctgtagttcgattatctctggcatgtgcaagcttcatgcaatggacaaggctgacgaggttcttcaacagatgcttgatagaagaattctgccagatgttgccacatataatagtctggtacatggatattattcattaggacagtgcgaagaggtggatcgggttctcaaggaaatgtctagaaatggtgttcaaccaaatattgtaacttacaatatacagatggattatctttgcaagagcggaaggtgcgcagaagctaggaaaatatttgattttatgatcggtttgggccaaaaaccagatgttactacctacagtgttctgcttcatgggtatgccatggaaaaatcttttcatgagatgcattgtctcattgatttgatggtgggaaatggtatctcaccagatcatcatgtctacaacatactcatatctgcatatgctaaagaagaaatggttggtgaggtattgcatatatttacaaaaatgcggcagcaaggattgaaccctaatgttgtgaactatggagcggtaataaacttgctttctagtattggccgaatggatgatgctatgtcccaattcagtcaaatgataactgaagggttagctcctgatgtcatagttttcaactcccttattagtggtttctgttcttgtggcaaatgggagaaggttcatgaactattttctgagatgtttgatcgcggcatctgtcccgacacagtgttcttcaacactgttatggatcacctttgcaaaaatggaagggttatggaagcccaagatgtgttcgacctgatggtacacatgggtgtgaagccttttgtccgtgattacaacacactgatacatggatactgtttagttggtaagatggatgaagggaggaagttacttgacaatatgttctcaattggctcgaaaccggatgatttcacctatagcatactgattgatggttactctaagaagggaaggatagatgatgcattgattgttatcaaggaaatgttggacgggaaggttaagccttctattatcacttttaatattatgattggtgcgttgcttaaaggtggcagaaaggaagaagccaaagatttgtttgatggtatctgggccaaaggattagtgcccgatgttgttacatatagcttaatgatacaaaaacttatagaagaaggttctctacaagagtctgatgatctattcctttctatggagaagaatggatgtgctgccgactcccggatgctaaatgctatagttagaagcttacttcagaaaggggaggtgccgagggctgggacttatctgtctaaaattgatgagaggaggttcacccctgaagcttccactgctagcttgttgactgcacttgtgtcaggggggaaaggccaggaatataaggagttactccctgaaaaatatcactcttttctggaacagggcactggc

SEQ ID NO: 2022 - DNA, 2145 bp, Triticum aestivum; identical to SEQ ID NO: 2021
  source 1..2145: mol_type = genomic DNA

SEQ ID NO: 2023 - DNA, 2145 bp, Triticum aestivum
  source 1..2145: mol_type = genomic DNA
atgaaccgccgcgtcgtccccgtcggcagacgcatcttggagcagaacatcaaggctcggtaccacgccggagacattggcaccgaggacgcactccacctgtttgacgaattgctccaggatgctgggcgctcctcgatccatgccatcaactgcctcctcaccgttgtcggccgtgattgccctgcgctcggcgtctccctcttcaaccgcgtcgcaaggtccaaggtggcgcccagcagtatcacctatgccattctggtcgactgctgctgccgcgctggccgccaggaccttggacacactgccatgggacacgtcatcaagatggggtttcttgcagatgccattatcactttcagccacctgctaaaggccatctgtgcggagaacaagaccagctacgcaatggacatcgtactccggataatgcccgagtttaactgcatgccaaacattttctcctacaacattcttttcaagggtctctgcaacgagaagagaagccaagaggctcttgagctgattcaaattatggttgaggatggaggttgctgccgacctgatgtggtgacctatagcactgtaattgatggcttgttgaaagagggtgaggtaggcaaggcttacagcctattttgtgaaatgctgcgtcagggggtatcgccggatgttgtgacctgtagttcgattatctctggcatgtgcaagcttcatgcaatggacaaggctgaggaggttcttcaacagatgcttgatagaagaattctgccagatgttgccacatataatagtctggtacatggatattattcattaggacagtgcgaagaggtggatcgggttctcaaggaaatgtctagaaatggtgttcaaccaaatattgtaacttacaatatacagatggattatctttgcaagagcggaaggtgcgcagaagctaggaaaatatttgattttatgatcggtttgggccaaaaaccagatgttactacctacagtgttctgcttcatgggtatgccatggaaaaatcttttcatgagatgcattgtctcattgatttgatggtgggaaatggtatctcaccagatcatcatgtctacaacatactcatatctgcatatgctaaagaagaaatggttggtgaggtattgcatatatttacaaaaatgcggcagcaaggattgaaccctaatgttgtgaactatggagcggtaataaacttgctttctagtattggccgaatggatgatgctatgtcccaattcagtcaaatgataactgaagggttagctcctgatgtcatagttttcaactcccttattagtggtttctgttcttgtggcaaatgggagaaggttcatgaactattttctgagatgtttgatcgcagcatctgtcccgacacagtgttcttcaacactgttatggatcacctttgcaaaaatggaagggttatggaagcccaagatgtgttcgacctgatggtacacatgggtgtgaagccttttgtccgtgattacaacatactgatacatggatactgtttagttggtaagatggatgaagggaggaagttacttgacaatatgttctcaattggctcgaaaccggatgatttcacctatagcatactgattgatggttactctaagaagggaaggatagatgatgcattgattgttatcaaggaaatgttggacgggaaggttaagccttctattatcacttttaatattatgattggtgcgttgcttaaaggtggcagaaaggaagaagccaaagatttgtttgatggtatctgggccaaaggattagtgcccgatgttgttacatatagcttaatgatacaaaaacttatagaagaaggttctctacaagagtctgatgatctattcctttctatggagaagaatggatgtgctgccgactcccggatgctaaatgctatagttagaatcttacttcagaaaggggaggtgccgagggctgggacttatctgtctaaaattgatgagaggaggttcacccctgaagcttccactgctagcttgttgactgcacttgtgtcaggggggaaaggccaggaatataaggagttactccctgaaaaatatcactcttttctggaacagggcactggc

SEQ ID NO: 2024 - DNA, 2145 bp, Triticum aestivum
  source 1..2145: mol_type = genomic DNA
atgagccgccgctttgtccccgtcagcagacgcatcttagagcagaacatcaaggctccgtaccacgccggagacattggcaccgaggacgcactccacctgtttgacgaattgctccaggttgctgggcgctcctcgatccatgccatcaactgcctcctcaccgttgtctgccatgattgccctgcgctcggcgtctccctcttcaaccgcgtcgcaaggtccaaggtggcgccctgcagtatcacctatgccattctggtcgactgctgctgccgcgctggccgcctggaccttggacacactgccatgggacacatcatcaagatgggatttactgcagatgctatgatcactttcagccacctactcaaggccatatgtgcagagaacaagaccagctatgcaatggacatcgtactccgaataatgcccatgtttaactgcgtacccaacaatttctcctacaacattcttttcaagggtctttgcaacgaaaggagaagccaagaggctcttgagctgattcacatgatggtacagcatggaggtagctgccaacctaatgtggtgtcctataacaccgtagttgatggcctgttgaaagagggtgaggtgggcaaagcttacaccctattttctgaaatgctgcgtcaggggatatcaccggatgttgtgacctgtcgttccatcatctctggcatgtgcaaggttcatgcaatggacaaggctgaggaggttcttcaacagatgcttgatagaagaattctgccagatgttgccacatataatagtctgatacatggatattatttattaggacagtgcgaagaggtggatcggattttcaaggaaatgtctagaaatggtgttcaaccaaatgttgtaacttacactatacagatggattatctttgcaagagcggaagatgcgcagaagctaggaagatttttgattctatgatcagtttgggccaaaaaccggatgtttatacctacagtattctactgcatgggtatgctatggaaaaatcttttcatgatatgcattgtctcattgatttgatggtagaaaatggtattgcaccagatcatcatgtctacaacatactcatatctgcatgtgctcaagaagaaatggttagtgacgtaatgcatatatttacaaaaatgcggcagcaaggattgaaccctaatgtagcgaactatggagtggttgtaaacttgctttgcagcatgggccgaatggatgatgctatgtaccaatacaatcaaatgataaccgaaggattagatcctgatatcatagttttcagcacccttataagtggtttttgttcttgtggcgcatgggagagggttcatgaaatattttctgaaatgttgaatcgtggcatctatcctgataccgtgttcttcaacataattatggaccacctttgcaaagagggaagggttatggaagcccaggatatcttcgacctgatggtacacatgggtgtgaagccttttgtccgtgattacaacacactgatacatggatactgtttagttggtaagatggatgaagggaggaagttacttgacaatatgtgctcaattggcttgaaaccggatgatttcacctatagcatactgattgatggttactctatgaagggaaggatagatgatgcattgattgttgtcagggaattgttggacgggaaggttggaccttctattatcacttttaatattatgattgttgcgttgcttaaaggtgggagaaaggaagaagccaaagatttgtttgatggtatctgggccaaaggattagtgcccgatgttgttacatatagcttaatgatacaaaaacttatagaagaaggttctctacaagagtctgatgatctattcctttctatggagaagaatggatgtgctgccgattcccgcatgctaaatgctatagttagaagcttacttcagaaaggggatgtgcccagggctgggacttatctgtctaaagttgatgagaggagcttcacccttgaaggttccacagctaccttgttgactgcacttgcttcagggaggaaaggccaggaatataaggggttactccctgaaaaataccactcttttctggaacaggacactggt

SEQ ID NO: 2025 - DNA, 2145 bp, Triticum aestivum; identical to SEQ ID NO: 2024
  source 1..2145: mol_type = genomic DNA

SEQ ID NO: 2026 - DNA, 1800 bp, Triticum aestivum
  source 1..1800: mol_type = genomic DNA
atggcaggtcccaaaagccacctactcaaggccatatgtgcagagaacaagaccagctatgcaatggacatcgtactccgaataatgcccatgtttaactgcgtacccaacaatttctcctacaacattcttttcaagggtctttgcaacgaaaggagaagccaagaggctcttgagctgattcacatgatggtacagcatggaggtagctgccaacctaatgtggtgtcctataacaccgtagttgatggcctgttgaaagagggtgaggtgggcaaagcttacaccctattttctgaaatgctgcgtcaggggatatcaccggatgttgtgacctgtcgttccatcatctctggcatgtgcaaggttcatgcaatggacaaggctgaggaggttcttcaacagatgcttgatagaagaattctgccagatgttgccacatataatagtctgatacatggatattatttattaggacagtgcgaagaggtggatcggattttcaaggaaatgtctagaaatggtgttcaaccaaatgttgtaacttacactatacggatggattatctttgcaagagcggaagatgcgcagaagctaggaagatttttgattctatgatcagtttgggccaaaaaccggatgtttatacctacagtattctactgcatgggtatgctatggaaaaatcttttcatgatatgcattgtctcattgatttgatggtagaaaatggtattgcaccagatcatcatgtctacaacatactcatatctgcatgtgctcaagaagaaatggttagtgacgtaatgcatatatttacaaaaatgcggcagcaaggattgaaccctaatgtagcgaactatggagtggttgtaaacttgctttgcagcatgggccgaatggatgatgctatgtaccaatacaatcaaatgataaccgaaggattagatcctgatatcatagttttcagcacccttataagtggtttttgttcttgtggcgcatgggagagggttcatgaaatattttctgaaatgttgaatcgtggcatctatcctgataccgtgttcttcaacataattatggaccacctttgcaaagagggaagggttatggaagcccaggatatcttcgacctgatggtacacatgggtgtgaagccttttgtccgtgattacaacacactgatacatggatactgtttagttggtaagatggacgaagggaggaagttacttgacaatatgtgctcaattggcttgaaaccggatgatttcacctatagcatactgattgatggttactctatgaagggaaggatagatgatgcattgattgttgtcagggaattgttggacgggaaggttggaccttctattatcacttttaatattatgattgttgcgttgcttaaaggtgggagaaaggaagaagccaaagatttgtttgatggtatctgggccaaaggattagtgcccgatgttgttacatatagcttaatgatacaaaaacttatagaagaaggttctctacaagagtctgatgatctattcctttctatggagaagaatggatgtgctgccgattcccgcatgctaaatgctatagttagaagcttacttcagaaaggggatgtgcccagggctgggacttatctgtctaaagttgatgagaggagcttcacccttgaaggttccacagctaccttgttgactgcacttgcttcagggaggaaaggccaggaatataaggggttactccctgaaaaataccactcttttctggaacaggacactggt

SEQ ID NO: 2027 - DNA, 2145 bp, Triticum aestivum; identical to SEQ ID NO: 2024
  source 1..2145: mol_type = genomic DNA

SEQ ID NO: 2028 - DNA, 2145 bp, Triticum aestivum; identical to SEQ ID NO: 2024
  source 1..2145: mol_type = genomic DNA

SEQ ID NO: 2029 - DNA, 2145 bp, Triticum aestivum; identical to SEQ ID NO: 2024
  source 1..2145: mol_type = genomic DNA

SEQ ID NO: 2030 - DNA, 2145 bp, Triticum aestivum; identical to SEQ ID NO: 2024
  source 1..2145: mol_type = genomic DNA

SEQ ID NO: 2031 - DNA, 2145 bp, Triticum aestivum
  source 1..2145: mol_type = genomic DNA
atgagccgccgctttgtccccgtcggcagacgcatcttagagcagaacatcaaggctcggtaccacgccggagacattggcaccgaggacgcactccacctgtttgacgaattgctccaggttgctgggcgctcctcgatccatgccatcaactgcctcctcaccgttgtcggccgtgattgccctgcgctcggcgtctccctcttcaaccgcgtcgcaagggccaaggtggcaccctgcagtatcacctatgccattctggtcgactgctgctgccgcactggccgccaggaccttggtttcgctgccatgggacacgtcatcaagatgggatttactgcagatgctatgatcactttcagccacctactaaaggccatctgtgcggagaacaagaccagctatgcaatggacatcgtactccgaataatgcccatgtttaactgcataccggatgtcttctcttacaacattcttttcaagggtctctgcaacgagaagagaagccaagaggctctcgagctgattcaggtgatggttgagcatggaggtcgctgccaacctgatgtggtgtcctatagcaccgtaattgatggcttgttgaaagagggtttggtgggcaaggtttacatcctattttgtgaaatgatacagagaggaatttcgccgaatgctgtgacctataactcaatcatctctggcatgtgcaaggttcatgcgatggacaaggctgagcaggttcttcaacagatgcctgatagaggaattctgccaaatgttgccacgtatactagtctaatacatggatatttttcattaggacagtgcaaagaggtggatcggattttcaaagaaatgtctagaaatggtgttcaaccaaatgttgtaacttataatatacagatggattatctttgcaagaatggaagatgcgcagaagctaggaagatttttgattccatggtcagtttgggccaaaaaccgactgttactacctacagcattttgcttcatgggtatgctctggaacgatcttttcatgagatacattgtctcattgatttgatggtgggaaatggtattgcgccaaatcattttctctacaacatactcatatctgcatatgctaaagaagaaatgattggtgaagtaatgcatatatttaaaaaaatgcggcagcatggattgaaccctaatgtagcgacctatggagcggtagtaaacttactttccaagattggccgaatggatgatgctatgtcccaattcaatcaaatgataactgaagggttagctcctgatatcatagttttcaccctccttattagtggtttctgttcttgtggcaaatgggagaaggttgatgaactattttctgagatgttggatcgcggcatctgtcccaacacagtgttcttcaacataattatggactgcctctgcaaaaatgaaagggttatggaagcccaagatctcttcgacctgatggtacacatgggtgtgaagcctgatgtgtgtacttataacacactgataggtggatacttgttcattggtaagatggatgaagtgaggaagttacttgacaatatggtctcaattggcttgaaaccaaatgttatcacatatagcatactgattgatggttactctaagaatggaagcatagatgatgcattggttgtttccagggaaatgttggccgggaaggttaagccttgtgttatcacttttaatattatgattggtgcattgcttaaatgtggcaggaaggcagaagccaaagatttgtttgacggtatctgggccaacggattagtgcccgatgttattacatatagcttaatgatacaaaaacttattgaagaaggttctctacaagagtctgatgatctattcctttctatggagaagaatggatgtgttgccgactcccatatgctaaatgctatagttagaagcttacttcagaaaggggaggtgccaagggctgggacttatctgtctaaaattgatgagaggaggttcacctttgaagcttccacagctagcttgttggttgcacttgcgtcagggcggaaaagccaggaatataaggagttactccccgaaaaataccactattttctggaagagggcactgat

SEQ ID NO: 2032 - DNA, 1245 bp, Triticum aestivum
  source 1..1245: mol_type = genomic DNA
atgagccgccgctttccccctggagctatgagcagacgcatcttggagcggaaaattcaagaccggtaccatgccggacacattggcactcacaacgcactcaacctgttcgacgaattgatccaggttgctgggccttcctcggtccgcgccattaactgcctcctcaccgtcgtcggccgtgattgccctgtgctgggcgtctccctcttcaaccgtgttgcaagagccaaggtgcctccccacaatatcacctatagcattctagtcgactgctgctgccgtgctggctgcttggaccttggacacgctgccatgggacacgttattaagctgggatttacagaagctatcgtcaatttcagccacctactcaaggccatctgtgcggagaagaagaccagctatgcaatggacattgtactccgaataatgcccatgtttaactgtgtaccaaatattttctcctacagcattgttttcaagggtctctgcaacgagaagagaagccaagaggctcttgagctgattcaaattatggttgaggatggaggttgctgccgacctgatgtggtgacctatagcactgtaattgatggcttgttgaaagagggtgaggtggaccaagcttacaacctattttctgaaatgctgcgtcagggggtatcgccgaatgttgtgacctgtagttcaatcatctctggcatgtgcaaagctcaatcagtggacaaggctaaggaggttcttcaacagatgtttgagagaggaattctgccaaatattaccacatataatagtctgatacaaggctattattcattaggacggtgcaaagaggtggatcagattttcaaggagatgactataaatggtgtccaaccagatattataacttacaatatacagatggattatctttgcaagagcggtcaatgtgcagaagctaggaagatttttgattctatgatcagtttgggccaaaacccgactgctactacctacagtattctgcttcatgggtatgctatggaaaaatcttttcatgatatgcattgtcttattgatttgatggtagaaaatggcatttcacctgatcattatgtctacaacatactcatatctgcatacgctaaagaagaaatggttggtgaggtaatgcatatatttacaaaaatgcggcagcaaggattgaaccctgatgcagtgagctacggaacagtaatagacttactttccaggattggc

SEQ ID NO: 2033 - DNA, 1245 bp, Triticum aestivum; identical to SEQ ID NO: 2032
  source 1..1245: mol_type = genomic DNA

SEQ ID NO: 2034 - DNA, 2151 bp, Triticum aestivum
  source 1..2151: mol_type = genomic DNA
atgagccgccgctttccccctggagctatgagcagacgcatcttggagcggaaaattcaagaccggtaccatgccggacacattggcactcacgacgcactcaacctgttcgacgaattgatccaggttgctgggccttcctcggtccgcgccattaactgcctcctcaccgtcgtcggccgtgattgccctgcgctgggcgtctccctcttcaaccgtgttgcaagagccaaggtgcctccccacaatatcacctatagcattctagtcgactgctgctgccgtgctggccgcttggaccttggacacgctgccatgggacacgttattaagctgggatttacagaagaagctatcgtcaatttcagccacctactcaaggccatctgtgcggagaagaagaccagctatgcaatggacattgtactccgaataatgcccatgtttaactgtgtaccaaatattttctcctacagcattgttttcaagggtctctgcaacgagaagagaagccaagaggctcttgagctgattcaaattatggttgaggatggaggttgctgccgacctgatgtggtgacctatagcactgtaattgatggcttgttgaaagagggtgaggtggaccaagcttacaacctattttctgaaatgctgcgtcagggggtatcgccgaatgttgtgacctgtagttcaatcatctctggcatgtgcaaagctcaatcagtggacaaggctaaggaggttcttcaacagatgtttgagagaggaattctgccaaatattaccacatataatagtctgatacaaggctattattcattaggacggtgcaaagaggtggatcagattttcaaggagatgactataaatggtgtccaaccagatattataacttacaatatacagatggattatctttgcaagagcggtcaatgtgcagaagctaggaagatttttgattctatgatcagtttgggccaaaacccgactgctactacctacagtattctgcttcatgggtatgctatggaaaaatcttttcatgatatgcattgtcttattgatttgatggtagaaaatggcatttcacctgatcattatgtctacaacatactcatatctgcatacgctaaagaagaaatggttggtgaggtaatgcatatatttacaaaaatgcggcagcaaggattgaaccctgatgcagtgagctacggaacagtaatagacttactttccaggattggccgaatggatgatgctatgtccctattcaatcaaatgataactgaaggattagctcctggtaccatagttttcaaccaccttattagtggtttttgtacttgtggcaaatgggagaaggttcatgaactattttctgaaatgttggatcgcggcatctgtccagacacagtgttcttcaacacagttatggatcgcctttgcaaaaatggaagggttacggaagcccaggatctcttcgacctgatggtacacatgggtgtgaagcctgatgtgtgtacttataacacactgatgggtggatacttgttcattggtaagatggatgaagtgagcaagttactagaaaatatgtgctcaattggcttgaaactggatgttgtcacctatagcatactgatagatggttactctaagaatggaaggatagatgatgcattggttgttttcagggaaatgatggacgggaaggttaagccttctgttatcacttttaatattatgattggtgcattgcttaaaggtggcaggaaggaagaagccacagatttgtttaatggtatctggcccaaaggattagtgcccgatgttgttacatatagcttaatgatacaaaaacttatagaagaaggttctctacaagagtctgatgatctattcctttctatggagaagaatggatgtgctgccgactcccgtatgctaaatgctatagttagaagcttacttcagaaaggggaggtgcccagggctgggtcttacctgtccaaaattgatgagaggagcttcacccttgaagcttccacagctagcttggtgacagcacttgcgtcaggggggaaaggccaagaatataaggagttactccccgaaaaataccactcttttctggaacacggcacggat

SEQ ID NO: 2035 - DNA, 1245 bp, Triticum aestivum; identical to SEQ ID NO: 2032
  source 1..1245: mol_type = genomic DNA

SEQ ID NO: 2036 - DNA, 1842 bp, Triticum aestivum
  source 1..1842: mol_type = genomic DNA
atgggacacgttattaagctgggatttacagaagaagctatcgtcaatttcagccacctactcaaggccatctgtgcggagaagaagaccagctatgcaatggacattgtactccgaataatgcccatgtttaactgtgtaccaaatattttctcctacagcattgttttcaagggtctctgcaacgagaagagaagccaagaggctcttgagctgattcaaattatggttgaggatggaggttgctgccgacctgatgtggtgacctatagcactgtaattgatggcttgttgaaagagggtgaggtggaccaagcttacaacctattttctgaaatgctgcgtcagggggtatcgccgaatgttgtgacctgtagttcaatcatctctggcatgtgcaaagctcaatcagtggacaaggctaaggaggttcttcaacagatgtttgagagaggaattctgccaaatattaccacatataatagtctgatacaaggctattattcattaggacggtgcaaagaggtggatcagattttcaaggagatgactataaatggtgtccaaccagatattataacttacaatatacagatggattatctttgcaagagcggtcaatgtgcagaagctaggaagatttttgattctatgatcagtttgggccaaaacccgactgctactacctacagtattctgcttcatgggtatgctatggaaaaatcttttcatgatatgcattgtcttattgatttgatggtagaaaatggcatttcacctgatcattatgtctacaacatactcatatctgcatacgctaaagaagaaatggttggtgaggtaatgcatatatttacaaaaatgcggcagcaaggattgaaccctgatgcagtgagctacggaacagtaatagacttactttccaggattggccgaatggatgatgctatgtccctattcaatcaaatgataactgaaggattagctcctggtaccatagttttcaaccaccttattagtggtttttgtacttgtggcaaatgggagaaggttcatgaactattttctgaaatgttggatcgcggcatctgtccagacacagtgttcttcaacacagttatggatcgcctttgcaaaaatggaagggttacggaagcccaggatctctttgacctgatggtacacatgggtgtgaagcctgacgtgtgtacttataacacactgatgggtggatacttgttcgttggtaagatggatgaagtgagcaagttacttgacaatatggtctcaattggcatggaaccagatgttatcacatatagcatactgattgatggttactctaagaatggaaggatagatgatgcattggttgttttcagggaaatgttggacacgaagggtaagccgtctgttatcagttttaatattatgattggtgcattgcttaaatgtggtaggaaggaagaagccaaagatttgtttgatggtatctgggccaatgggttagtgcctgacgttattacatatagcttaatgatacaaaaacttattgaagaaggttctctacaagagtctgatgatctattcctttctacggagaagaatggatgtgctgccgactcccgtaggctaaatgctatagttagaagcttacttcagaaaggggagattcctagggctgggacttatctgtctaaaattgatgagaggggcttcacccttgaagcttccacagctagcttgttgactgcacttgcttcagggggaaaaggccaggaatacaaggagttactccctgaaaaataccactcttttctggaacagggcactttgaacttc

SEQ ID NO: 2037 - DNA, 2145 bp, Triticum aestivum
  source 1..2145: mol_type = genomic DNA
atgagccgccgctttgtccccgtcgacagacgcatcttggagaggaacatcaaggatcggtaccatgccggatgcattggcaccgaggacgcactccacctgttcgacgaattgctccaggttgctgggccttcctcgatccctgccatcaactgcctcctcactgttgttggccgtgattgccccgcgctcggcgtctccctcttcaaccatgttgcaagagccaaggtgcctccccacaatatcacctatggcattctagtcgactgctgctgccgtgctggccgcctggaccttggacacgctgccatgggacacgtcattaagttgggatttacagcagaagctatcatcaatttcagccacctactcaaggccatctgcgccgagaagaagaccagttatgcaatggacatcgtactccggataatgcctgagtttaactgcataccaaacattttctcctataacattcttttcaagggtctctgcaacgagaagagaagccaagaggctctcgagctgattcaaattatggttgaggatggaggttgctgccgacctgatgtggtgacctatagcactgtaattgatggcttgttgaaagaggatgaggtggaccaagcttacagcctattttctgaaatgctgcgtcagggggtatcaccgaatgttgtgacctgtaattcaatcatctctggcatgtgcaagcttcacgcgatggacaaggctgaggaggttcttcaacagatgcttgatagacgaattctgccagatgttaccacatatactagtttaatacatggatattattcattaggacagtgcgaggaggtggatcgggttttcatagaaatgtctagaaatggtgttcaaccaaatatcataacttatagtatacagatggattatctttgcaagaatggaagatgcacagaagctaggaagaattttgatttcatgatcagtttgggccagaaaccgactgttactacctacaacattatgcttcatgggtatgctatggaaagatcttttcatgatatgaattgtctcattgatttgatggatgataatggtatttcaccagatcattatggatacaacatacttatatttgcatatgctgaagaaaaaatggttgatgaagtaatgcatatatttacaaaaatgcggcagcaaggattgaaccctgatgcagtgagctatggaacagtaatagacttactttccaggattgaccgaatggatgatgctatgtcccagttcaatcaaatgataactgaagggttagttcctgatatcgtagtttttaaccctcttattaggggtttctgttcttgtggcaaatgggagaaggttgatgaactattttctgagatgttggatcgcggcatctgtcccaacatagtgttcttcaccacaattatggaccgcctttgcaaaaatggaagggttatggaagcccaagatctcttcgacctgatggtacacatgggtgtgaagcctgatgtgtgtacttataacatactgataggtggatacttgttcattggtaagatggatgaagtgagcaagttacttgacaatatggtctcaattggcatggaaccagatgttatcacctataacatactgattgatggttactctaagaatggaaggatagatgatgcatttgttgttttcagagaaatgttggccgggaaggttaagccttgcattatcacttttaatattatgcttggtgcgttgcttaaaggtggcaggaaggaagaggctaaagatttgtttgatggtatctgggctaaagggttagtgcccaccgttgttacatatagcttaatgatacaaaaacttatagaagaaggttctctacaagagtctgatgatctatttgtttctatggagaagaatggatgtgctgccgactcccatataataaatgctatagttagaagcttatttcggaaaggggaggtgcccagggctgggacttatctgtctaaaattgatgagaggagcttcacccttgaagcttccacagctatcttgttgactgcacttgcttcaggggggaaaggccaggaatataaagagttactccctgagaagtaccactcttttctggaacagggcactgat

SEQ ID NO: 2038 - DNA, 2145 bp, Triticum aestivum; identical to SEQ ID NO: 2037
  source 1..2145: mol_type = genomic DNA

SEQ ID NO: 2039 - DNA, 2145 bp, Triticum aestivum; identical to SEQ ID NO: 2037
  source 1..2145: mol_type = genomic DNA

SEQ ID NO: 2040 - DNA, 2145 bp, Triticum aestivum; identical to SEQ ID NO: 2037
  source 1..2145: mol_type = genomic DNA

SEQ ID NO: 2041 - DNA, 2145 bp, Triticum aestivum; identical to SEQ ID NO: 2037
  source 1..2145: mol_type = genomic DNA

SEQ ID NO: 2042 - DNA, 2145 bp, Triticum aestivum
  source 1..2145: mol_type = genomic DNA
atgagccgccgctttgtccccgtcgacagacgcatcttggagaggaacatcaaggatcggtaccatgccggatgcattggcaccgaggacgcactccacctgttcgacgaattgctccaggttgctgggccttcctcgatccctgtcatcaactgcctcctcactgttgttggccatgattgccccgcgctcggcgtctccctcttcaaccatgttgcaagagccaaggtgcctccccacaatatcacctatggcattctagtcgactgctgctgccgtgctggccgcctggaccttggacacgctgccatgggacacgtcattaagttgggatttacagcagaagctatcatcaatttcagccacctactcaaggccatctgcgccgagaagaagaccagttatgcaatggacatcgtactccggataatgcctgagtttaactgcataccaaacattttctcctataacattcttttcaagggtctctgcaacgagaagagaagccaagaggctctcgagctgattcaaattatggttgaggatggaggttgctgccgacctgatgtggtgacctatagcactgtaattgatggcttgttgaaagaggatgaggtggaccaagcttacagcctattttctgaaatgctgcgtcagggggtatcaccgaatgttgtgacctgtaattcaatcatctctggcatgtgcaagcttcacgcgatggacaaggctgaggaggttcttcaacagatgcttgatagacgaattctgccagatgttaccacatatactagtttaatacatggatattattcattaggacagtgcgaggaggtggatcgggttttcatagaaatgtctagaaatggtgttcaaccaaatatcataacttatagtatacagatggattatctttgcaagaatggaagatgcacagaagctaggaagatttttgatttcatgatcagtttgggccagaaaccgactgttactacctacaacattatgcttcatgggtatgctatggaaagatcttttcatgatatgaattgtctcattgatttgatggatgataatggtatttcaccagatcattatggatacaacatacttatatttgcatatgctgaagaaaaaatggttgatgaagtaatgcatatatttacaaaaatgcggcagcaaggattgaaccctgatgcagtgagctatggaacagtaatagacttactttccaggattgaccgaatggatgatgctatgtcccagttcaatcaaatgataactgaagggttagttcctgatatcgtagtttttaaccctcttattaggggtttctgttcttgtggcaaatgggagaaggttgatgaactattttctgagatgttggatcgcggcatctgtcccaacatagtgttcttcaccacaattatggaccgcctttgcaaaaatggaagggttatggaagcccaagatctcttcgacctgatggtacacatgggtgtgaagcctgatgtgtgtacttataacatactgataggtggatacttgttcattggtaagatggatgaagtgagcaagttacttgacaatatggtctcaattggcatggaaccagatgttatcacctataacatactgattgatggttactctaagaatggaaggatagatgatgcatttgttgttttcagagaaatgttggccgggaaggttaagccttgcattatcacttttaatattatgcttggtgcgttgcttaaaggtggcaggaaggaagaggctaaagatttgtttgatggtatctgggctaaagggttagtgcccaccgttgttacatatagcttaatgatacaaaaacttatagaagaaggttctctacaagagtctgatgatctatttgtttctatggagaagaatggatgtgctgccgactcccatataataaatgctatagttagaagcttatttcggaaaggggaggtgcccagggctgggacttatctgtctaaaattgatgagaggagcttcacccttgaagcttccacagctatcttgttgactgcacttgcttcaggggggaaaggccaggaatataaagagttactccctgagaagtaccactcttttctggaacagggcactgat

SEQ ID NO: 2043 - DNA, 2145 bp, Triticum aestivum; identical to SEQ ID NO: 2037
  source 1..2145: mol_type = genomic DNA

SEQ ID NO: 2044 - DNA, 2139 bp, Triticum aestivum
  source 1..2139: mol_type = genomic DNA
atgagccgccgctttcccactgtcggcagacgcatcttggagcggaaaattcaagaccggtaccgtgccggacacattggcactgacgacgcactcaacctgttcgacgaattgatccagcttgctgggccttcctcggtccgcgccattaactgcctcctcaccgtggtcggccgtgattgccctgcgctcggcatcttcctcttcaatcgtgttgcaagagccaaggtgcctccccacaatatcacctatggcattctagtcgactgctgctgccgtgctggccgcttggaccttggacacgctgccatgggacacgtcattaagttgggatttgcagcagaagccatcgtcaatttcagccacctactcaaagccatctgcgccgagaagaagaccagctatgcaatggaaatcgtactccgaataatgcccatgtttaactgcgtaccaaacattttctcctacagtattcttttcaagggtctctgcaacgagaaaagaagccaagaggctctcgagctgattcacatcatggttgaccatggaggtagctgccaacctaatgtggtgtcctataacactgtagttgatggcctgttgaaagagggtgaggcaggcaaggcttacagcctattttctgaaatgctacagagggaaattttgccggatgttgtgacctacaactcaatcatctctggcatgtgcaaggttcatgcgatggacaaggctgaggaggttcttagacagatgtttgatagaggaattctcccagatattgccacatatactagtctaatacatggatattattcatcaggacagtgcaaagaggtggaacgggttttcaacgaaatgtctagaaatggtgttcaaccaaatatggtaacttacaatatacagatggattatctttgcaagagcggaagatgcacagaagctaggaagatttttgattctctgatcgatttgggccaaaaactgactgttactacctacagcattctgcttcatgggtatgctctggaacgatctttgcatggtatgcattgtctcattgatttgatggtgggaaatggtatctcaccagatcatcatgtctacaacatactcatatctgtatatgctaaagaaggaatggttggtgaggtaatgcatatatttacaaaaatgcggcagcaaggattgaaccctgatgttgtgaactacggaacggtaataaacttactttgcagcattggccgaatggatgatgctatgttgcaattcagtcaaatgataacggaaggattagctcctaatatcatagttttcaccccccttattagtggtttttgtacgtatggcaaatgggagaaggttcatgaactattttctgaaatgttcgatcgcggcatctatcctgataccttgtttttcaccacagttatggaccgcctttgcaaaaatgaaagggttatggaagcccaagatatctttgacctgatgggacacatgggtgttaagcctgacgtgtgtacttataacacactgataggtggatacttgtttgttggtaagatggatgaagtgaggaaattacttgacaatatggtctcaattggcatggaaccagatgttatcacctatagcagactgatagatggttactctaagaatggaaggatagatgatgcattggttgttttctgggaaatgttggatgggaaggttaagccgtctgttatcacttttaatattattattggtgcgttgcttcaaggtggcaggaaggaagaagccaaagatttgtttgattgtatctgggccaaaggattagtgcctgatgttgttacatatagcttaatgatacaaaaacttatagaagaaggttctctacaagagtctgatgatctattcatttctatggagaagaatggatgtgctgccgactcccgtatgctgaatgctatagttagaagcttacttcagaaagaggagattcttagggctgggacttatctgtctaaaattgatgagaggaggttcacccttgaagcttccactgcgagcttgttgactgcacttgtgtcaggggggaaaggccaggaatataaggagttactcccggaaaattactctgaactgctaatcgaggcc

SEQ ID NO: 2045 - DNA, 2073 bp, Triticum aestivum
  source 1..2073: mol_type = genomic DNA
atgagccgccgcgccgtccccgctggcagacgcatcttggagcagaacatcaaggcccggtaccgcgctggcaacattggcaccgaggatgcactccacctgtttgacgaattgctcccggttgctcggccctcctcagttcctgccatcaactgcctcctcattgtcgtcggtcgtgattgccctgcactcgccgtctccctcttcaaccgcattgcaagaaccaaggtggcaccccagaatatcacctacggcattctagtcgactgctgctgccttgcgggccgcttggaccttggtttcgctgccatgggccacatcattaagacgggatttgcggcaggatccgttatctctttcagccacctgctcagggccgtctgtgcggagaagaagaccagctacggaatggacatcgtgctccgaattatgcctgagcttaactgcacgccggatgtttactcctacagcattcttttcaagggtctctgcaacgagaagagaagccaagaggctctcgagctgattcacgtgatggttgagcacggaggtagctgccaacctaatctggtctcctacagcaccgtaattgatggcttgttgaaagagggcgaggtgggcaaagcttacagcctattttgtgaaatggtacacagggggatttcgccagatattgtgacctacaactcaatcatctctggcatgtgcaaggtccatgcgatggacaaggctgagaaggttcttcaacaaatgtttgatagagaaattctgccagatactaccacatatactagcctaatacatggatattattcatcaggacaatgcaaagaggtggaacgggttttcgagcacatgtctataaacggtgttcaaccaaatatgataacttacaatatacagatggattatctttgcaagagcggaagatgcgcagaagctaggaagatttttgattctatggtcagtttgggccaaaaaccgtctgttactacctatagtattctgcttcatggttatgctatggaaaaatcatttcatgatatgcattgtctcattgatttgatggtagaaaatggtatctcaccagatcattatgtctacaacatgctcatatctgcatgtcctaaagaagaaatgtttggtgaggtaatgcatatatttacaaaaatgcggcagcaaggattgaaccctaatgttgctaactatggagcggtaataaacttgctttccagtgctggcaaaatggatgatgctatgtgccaattcaatcaaatgataaccgaaggattagctcctgatatcgtaattttcaacacccttattagtggtttttgtacttgtggcaaatgggagaaggttcatgagctattttctgaaatgttgaatcgcggcatctatcctgatatcgtgtccttcaccatacttatggaccgcctttgcaaaagtggaagggttatcgaagcccaagatatgtttgacctgatggtacgcatcggtgttaagcctaacattcatacttatggcacattgatgcatgggtactttttcgttagaaaggtggatgaagtgaggaagttacttggcaatatgctctcaactggcttgaaaccagatgttttcacctataccatattgattgatggttactttaagaatggaatgatagatgacgcatcagctgttttcactgagatgttggaaaagaaagttgagccttctgtcatcacttacagaacaatgcggtatggcctgttaaattctggaaggactgttgctgccactaaactatatctcaggatgattgacagtggaatacacgtggatattgcggcctacaacataattctcagaggcctttgtaaaaataactgtgtcgatggagcgctaagaatgtttcaacacctatcttcaacaaattatccgcttgaggttgggacttacaatattatgattagtgcgttggttaaaggtggcagaaaggaagaagccacagatttgtttgatgatatgttggccaaaggattagtgccggatgctgttatgtatagcttaataaaaaaaggagtagtc

SEQ ID NO: 2046 - DNA, 2073 bp, Triticum aestivum; identical to SEQ ID NO: 2045
  source 1..2073: mol_type = genomic DNA

SEQ ID NO: 2047 - DNA, 2073 bp, Triticum aestivum; identical to SEQ ID NO: 2045
  source 1..2073: mol_type = genomic DNA

SEQ ID NO: 2048 - DNA, 2073 bp, Triticum aestivum; identical to SEQ ID NO: 2045
  source 1..2073: mol_type = genomic DNA

SEQ ID NO: 2049 - DNA, 2073 bp, Triticum aestivum; identical to SEQ ID NO: 2045
  source 1..2073: mol_type = genomic DNA

SEQ ID NO: 2050 - DNA, 2073 bp, Triticum aestivum; identical to SEQ ID NO: 2045
  source 1..2073: mol_type = genomic DNA

SEQ ID NO: 2051 - DNA, 1989 bp, Triticum aestivum
  source 1..1989: mol_type = genomic DNA
atggactgctgctgccgcgcaaaccgccaggatctggcgctcgccttcttcggccgtctcctcaggacgggacttaaggcaggcgtcatagaagtcaacactcttctcaagggactctgccgcgcaaagcgggctgatgaggctctggacattctgcttcacaggatgcctgagcttggctgcgcccccaacgtggtggcatataccacggtcatccacggcttctttaaggaaggccaagtaagcaaggcatgcaatctattccatgaaatggcgctgcagggcgttacacctgatgtggtgacatataactcggttattgatgcgctgtgcaaggccagagccatggacaatgcagagtatttccttcgtcaaatggttgataatggtgtcgtacctaataatgtgacatatagtagcctcatccatggatattcctcttcaggccattggaaggaggcagttagggtattcaaagagatgacaggtcggagggttacaccagatgtgcatacttacaacatgtttatgacctttctttgcaaacatggaagaagcaaagaagctgcaggaatttttgataccatggctatgaagggcctgaaacctgacaacgtttcatatgctattcgccttcatgggtatgccaccgaaggatgcttagttgatatgattaatctcttcaattcaatggaaagagactgtattctacctgactgtcatatcttcaacatactgattaatgcatatgctaaatctgggaagcttgataaggctatgcttatcttcaatgaaatgcagaaacaaggagtgagtccaaatgcagtcacatattcaaccataatacatgcattttgcaaaaagggtaggttggatgatgctgtgataaagtttaatcagatgattgatacaggagtacgacagggcacagctgtttatcgttccctaatccaaggtttttgtacacacggcgatttggtgaaagcaaaggaattgcttactgaaatgatgaacaaaggtatacctcctcctgatattaagttcttccattcaatcatgcagaacctatgcacagaaggaagggtaatagaagcacgggatatccttggcttgatagcacacataggtatgaggcctaatgtttgcacatttaatatactgatcggtggatactgcctagtcggcaagatggaggatgcctcaaaaatatttgatgatatgatgtcatatggcttagaaccttctaatattacgtatggtatacttattaatggctattgcaaaaatagaaggattgatgacgggcttattctgttcaaagagatgctgcgcaagggacttaaacctacaacttttaattataacgtcatactggatggattatttctggctggacaaactgttgctgcaaaagagaagtttgatgagatggttgaatctggagtaagtgtgtgcattgatacatactctatagttcttggtggactttgtagaaatagctgcagtagcgaagcgatcaccctgttccgaaaattaagcgcaatgaatgtgaaatttaatattacaattgtcaataccattattggtgccttctacagggtcgagagaaaccaagaggctaaggatttgcttgctgctattccagccagtggcttggttcctaatgttgttacgtacaccataatgattaaaaatcttataaaagaaggttcagtggaagaagctgacaatctttttttatcgatagagaagagcggctgtagtgccaactcttatctgttaaatcatatcatcagaaggttactggaaaaaggagagacagtcaaggctggaaattatatgtctaaagttgatgcaaagagctactcacttgaagctaaaactgtttcgctgctgatctctctgttttcaaggaaagggaaatatagagaacacatcaaattgctccctacaaagtatcagtttctggaagaagcagccacagttgaa

SEQ ID NO: 2052 - DNA, 801 bp, Triticum aestivum
  source 1..801: mol_type = genomic DNA
atggaggatgcctcaaaaatatttgatgatatgatgtcatatggcttagaaccttctaatattacgtatggtatacttattaatggctattgcaaaaacgaaaggattaacgatgggttgattctgttcaaagagatgctgcgcaagggacttaaacctacaacttttaattataacatcatactggatggattatttctggctggacaaactgttgctgcaaaagagaagtttgatgagatggttgaatctggagtaagtgtgtgcattgatacatactctatagttcttggtggactttgtagaaatagctgcagtagcgaagcgatcaccctgttccgaaaattaagcgcaatgaatgtgaaatttaatattacaattgtcaataccattattggtgccttctacagggtcgagagaaaccaagaggctaaggatttgtttgctgctattccagccagtggcttggttcctaatgttgttacctacaccataatgattaaaaatcttataaaagaaggttcagtggaagaagctgacaatctttttttatcgatggagaagagcggctgtagtgccaacttttatctgttaaatcatatcatcagaaggttactggaaaaaggagagatagtcaaggctggaaattatatgtctaaagttgatgcaaagagctactcccttgaagctaaaactgtttcactgctgatctctctgttttcaaggaaagggaaatatagagaacacatcaaattgctccctacaaagtatcagtttctggaagaagcagccacagttgaa

SEQ ID NO: 2053 - DNA, 1989 bp, Triticum aestivum
  source 1..1989: mol_type = genomic DNA
atggactgctgctgccgcgcaaaccgccaggatctggcgctcgccttcttcggccgtctcctcaggacgggacttaaggcaggcgtcatagaagtcaacactcttctcaagggactctgccgcgcaaagcgggctgatgaggctctggacattctgcttcacaggatgcctgagcttggctgcgcccccaacgtggtggcatataccacggtcatccacggcttctttaaggaaggccaagtaagcaaggcatgcaatctattccatgaaatggcgctgcagggcgttacacctgatgtggtgacatataactcggttattgatgcgctgtgcaaggccagagccatggacaaggcagagtatttccttcgtcaaatggttgataatggtgtcgtacctaataatgtgacatatagtagcctcatccatggatattcctcttcaggccattggaaggaggcagttagggtattcaaagagatgacaggtcggagggttacaccagatgtgcatacttacaacatgtttatgacctttctttgcaaacatggaagaagcaaagaagctgcaggaatttttgataccatggctatgaagggcctgaaacctgacaacgtttcatatgctattcgccttcatgggtatgccaccgaaggatgcttagttgatatgattaatctcttcaattcaatggaaagagactgtattctacctgactgtcatatcttcgacatactgattaatgcatatgctaaatctgggaagcttgataaggctatgcttatcttcaatgaaatgcagaaacaaggagtgagtccaaatgcagtcacatattcaaccataatacatgcattttgcaaaaagggtaggttggatgatgctgtgataaagtttaatcagatgattgatacaggagtacgacagggcacagctgtttatcgttccctaatccaaggtttttgtacacacggcgatttggtgaaagcaaaggaattgcttactgaaatgatgaacaaaggtatacctcctcctgatattaagttcttccattcaatcatgcagaacctatgcacagaaggaagggtaatagaagcacgggatatccttggcttgatagcacacataggtatgaggcctaatgtttgcacatttaatatactgatcggtggatactgcctagtcggcaagatggaggatgcctcaaaaatatttgatgatatgatgtcatatggcttagaaccttctaatattacgtatggtatacttattaatggctattgcaaaaatagaaggattgatgacgggcttattctgttcaaagagatgctgcgcaagggacttaaacctacaacttttaattataacgtcatactggatggattatttctggctggacaaactgttgctgcaaaagagaagtttgatgagatggttgaatctggagtaagtgtgtgcattgatacatactctatagttcttggtggactttgtagaaatagctgcagtagcgaagcgatcaccctgttccgaaaattaagcgcaatgaatgtgaaatttaatattacaattgtcaataccattattggtgccttctacagggtcgagagaaaccaagaggctaaggatttgtttgctgctattccagccagtggcttggttcctaatgttgttacgtacaccataatgattaaaaatcttataaaagaaggttcagtggaagaagctgacaatctttttttatcgatagagaagagcggctgtagtgccaactcttatctgttaaatcatatcatcagaaggttactggaaaaaggagagacagtcaaggctggaaattatatgtctaaagttgatgcaaagagctactcacttgaagctaaaactgtttcgctgctgatctctctgttttcaaggaaagggaaatatagagaacacatcaaattgctccctacaaagtatcagtttctggaagaagcagccacagttgaa

SEQ ID NO: 2054 - DNA, 777 bp, Triticum aestivum
  source 1..777: mol_type = genomic DNA
atgaactgctgctgccgcgtctgtcgtccagaccttgggtttgccttatttggccgcctcctaaggagaggcctcaaaacagatgatatcgtcaccaacaccctcctcaagtgcctctgctgcgcaaaacggacagacgaggctgtcagcgtgctgcttcataggatgtccaagcttggttgtgtgcctgatgtcatctcatacaacacagttcttaagagcttatgtgataatagcagcagccagcgggcgctcgacctccttcagatgatgacgaaaggaggtggctgctcccctgacgtagtgacatacaacacggtcatccatggcttcctgcaggaaggggaagtaagcaaggcatgcgatcgataccatgaaatggtgcagcaaggggttctgcatgatgtggtgacatataattcgattcttgatgcgctgtgcaaggcaggagctatggacaaggctgagttgttccttcagcagatggctgatgatgatattcgaccgaatgaagtgacatataatgcaatgatccatggatattccactttgggccagtggaaaagggcgactcaaatgtttagagaaatgacaagccgtggtcttgctccaaatattgttacttggagctcgttgatgacctccctctgcaagcatggaagaagcaaagaagctgcagaaattttcattccatggctgcaaaaggccacaagcctaacatcgttacgtatcgtgttctgcttcacgggtatgccgctgagggattctttgcagata

SEQ ID NO: 2055 - DNA, 1821 bp, Triticum aestivum
  source 1..1821: mol_type = genomic DNA
atgatgacgaaaggaggtggctgctcccctgacgtagtgacatacaacacggtcatccatggcttcctgcaggaaggggaagtaagcaaggcatgcgatctataccatgaaatggtgcagcaaggggttttgcatgatgtggtgacatataattcgattcttgatgcgctgtgcaaggcaggagctatggacaaggctgagttgttccttcggcagatggttgatgatgatattcgaccgaatgaagtgacatataatgcaatgatccatggatattccactttgggccagtggaaaaaggcgactcaaatgtttagagaaatgacaagccgtggtcttgctccaaatattgttacttggagctcgttgatgacctccctctgcaagcatggaagaagcaaagaagctgcagaaatttttcattccatggctgcaaaaggccacaagcctaatatcgttacgtatcgtgttctgcttcacgggtatgccgctgaaggattctttgcagatatgattgatctctttaattcaatggcaaacaatggtattgtacccgattgccacgttttcaacatattaattaatgcatatgctaaatgtggaatgatggatgaagctatgtcaatgcttactgaaatgcggggacaaggagtgagtccggatgtgttcacctatgcaactgtaatagctgcactttgcagaatgggtaggttgactgatgctatggacaattttaatcggatgattgggaagggagtacaaccgagcaaagttgtttatcactccctaattcagggtttctgtacgcatggtaatctggtgaaagtgaaggagttgatttttggaatgacggacaaaggtattcctcaccctaacattgtcttcttcagttcaataatgcatagtctgtgcaacgaaggaagggttatggatgcacaccatatctttgacttggttatagacattggtgagagacctgatctcattacgtttaatacgctgattgacggatattgcttagtcagcaagatggaggaagcactccgactacttgattccatggtatcagctggcattaagccaaatgtgattacatataatacacttattaatggctattgtaggagtggaaggctcgatgatggcgttattctattcagagaaatgttgcataccagagttaaacctaacactgttacatataacatcatactggatgggttatttcgtgctggaagaactgttgctgcgaagaagatgttccatgagatgatcgaaactggaacagcagtgagcatttccacatacagcatagttcttggaggactttgtaggaataactgcaccgatgaagcaatcacttttttccagaaattagttgcaatgaatgtgaagtccgatattgcgatactcaataccatgattaaggcaatgtacaaggttcagagaagagaagaagctaacgatttgtttgcttcattaccagcctatggactggtgcctaatgctgctacttacagagtaatgataagcaatcttttgaaagaaggatcattggaagaagctgacaatatgttctcgtcaatggagaaaagtggttgtgctccaagctctcgtcttgtaaatgatatcatcagaaaattattggaaaagggggagatagtcaaggccggaaattatatgtcgaaagttgacgggaagatcatctcctttgaagcttcaaccacttcgttgttgttgtctctcttttcggagaaaggcaaatatcgggaacaattacaattgctccctgcgaaataccaactttttgagggagtcatt

SEQ ID NO: 2056 - DNA, 1395 bp, Triticum aestivum
  source 1..1395: mol_type = genomic DNA
atggctgcaaaaggccacaagcctaacatcgttacgtatcgtgttctgcttcacgggtatgccgctgagggattctttgcagatatgattgatctctttaattcaatcgcaaacaatggtattgtacccgattgccacgttttcaacatattaattaatgcatatgctaaatgtggaatgatggatgaagctatgtcaatgcttactgaaatgcggggacaaggagtgagtccggatgtgttcacctatgcaactgtaatagctgcactttgcagaatgggtaggttgactgatgttatggacaattttaatcggatgattgggaagggagtacaaccgagcaaagttgtttatcactccctaattcagggtttctgtacgcttggtgatctggtgaaagtgaagaagttgatttttgaaataacggacaaaggtattcctcaccctaacattgtcttcttcagttcaataatgcatagtctgtgcaacgaaggaagggttatggacgcacaccatatctttgacttggttatagacattggtgagagacctgatctcattacatttaatatgctgattgacggatattgcttagtcagcaagatggaggaagcactccgactacttgattccatggtatcagctggcattaagccaaatgtgattacatataatacacttattaatggctattgtaggagtggaaggcttgatgatggcgttattctattcagagaaatgttgcataccagagttaaacctaacactgttacatataacatcatactggatgggttatttcgtgctggaagaactgttgctgcgaaaaagatgttccatgagatgatcgaaactggaacagcagtgagcatttccacatacagcatagttcttggaggactttgtaggaataactgcaccgatgaagcaatcgcttttttccagaaattagttgcaatgaatgtgaagttcgatattgtgatactcaataccatgattaaggcaatctacaaggttcagagaagagaagaagctaacgatttgtttgctttattaccagcctgtgggctggtacctaatgcctctacttacggagtagtaatacagaatcttctgaaagaaggatcgttggaagaagctgacaatatgttttcatcaatggagaagagtggttgtgctccaagctctcgtcttgtaaatgatatcatcagaaaattattggaaaagggggagatagtcaaggccggaaattatatgtcgaaagttgacgggaagatcatctcctttgaagtttcaaccacttcgttgttgttgtctctcttttcggagaaaggcaaatatcgggaacaattacaattgctccccgcgaaataccaattttttgagggagtcatt

SEQ ID NO: 2057 - DNA, 1821 bp, Triticum aestivum; identical to SEQ ID NO: 2055
  source 1..1821: mol_type = genomic DNA

SEQ ID NO: 2058 - DNA, 1821 bp, Triticum aestivum
  source 1..1821: mol_type = genomic DNA
atgatgacgaaaggaggtggctgctcccctgacgtagtgacatacaacacggtcatccatggcttcctgcaggaaggggaagtaagcaaggcatgcgatctataccatgaaatggtgcagcaaggggttttgcatgatgtggtgacatataattcgattcttgatgcgctgtgcaaggcaggagctatggacaaggctgagttgttccttcggcagatggttgatgatgatattcgaccgaatgaagtgacatataatgcaatgatccatggatattccactttgggccagtggaaaaaggcgactcaaatgtttagagaaatgacaagccgtggtcttgctccaaatattgttacttggagctcgttgatgacctccctctgcaagcatggaagaagcaaagaagctgcagaaatttttcattccatggctgcaaaaggccacaagcctaatatcgttacgtatcgtgttctgcttcacgggtatgccgctgaaggattctttgcagatatgattgatctctttaattcaatggcaaacaatggtattgtacccgattgccacgttttcaacatattaattaatgcatatgctaaatgtggaatgatggatgaagctatgtcaatgcttactgaaatgcggggacaaggagtgagtccggatgtgttcacctatgcaactgtaatagctgcactttgcagaatgggtaggttgactgatgctatggacaattttaatcggatgattgggaagggagtacaaccgagcaaagttgtttatcactccctaattcagggtttctgtacgcatggtaatctggtgaaagtgaaggagttgatttttgaaatgacggacaaaggtattcctcaccctaacattgtcttcttcagttcaataatgcatagtctgtgcaacgaaggaagggttatggatgcacaccatatctttgacttggttatagacattggtgagagacctgatctcattacgtttaatacgctgattgacggatattgcttagtcagcaagatggaggaagcactccgactacttgattccatggtatcagctggcattaagccaaatgtgattacatataatacacttattaatggctattgtagaagtggaaggctcgatgatggcgttattctattcagagaaatgttgcataccagagttaaacctaacactgttacatataacatcatactggatgggttatttcgtgctggaagaactgttgctgcgaagaagatgttccatgagatgatcgaaactggaacagcagtgagcatttccacatacagcatagttcttggaggactttgtaggaataactgcaccgatgaagcaatcacttttttccagaaattagttgcaatgaatgtgaagtccgatattgcgatactcaataccatgattaaggcaatgtacaaggttcagagaagagaagaagctaacgatttgtttgcttcattaccagcctatggactggtgcctaatgctgctacttacggagtaatgataagcaatcttttgaaagaaggatcattggaagaagctgacaatatgttctcgtcaatggagaaaagtggttgtgctccaagctctcgtcttgtaaatgatatcatcagaaaattattggaaaagggggagatagtcaaggccggaaattatatgtcgaaagttgacgggaagatcatctcctttgaagcttcaaccacttcgttgttgttgtctctcttttcggagaaaggcaaatatcgggaacaattacaattgctccctgcgaaataccaattttttgagggagtcatt

SEQ ID NO: 2059 - DNA, 2088 bp, Triticum aestivum
  source 1..2088: mol_type = genomic DNA
atgaactgctgctgccgcgtctgtcgtccagaccttgggtttgccttatttggccgcctcctaaggacaggcctcaaaacagatgatatcgtcaccaacaccctcctcaagtgcctctgctgcgcaaaacggacagacgaggctgtcagcgtgctgcttcataggatgtccaagcttggttgtgtgcctgatgccatctcatacaacacagttcttaagagcttatgtgataatagcagcagccagcgggcgctcgacctccttcagatgatgacgaaaggaggtggctgctcccctgacgtagtgacatacaacacggtcatccatggcttcctgcaggaaggggaagtaagcaaggcatgcgatcgataccatgaaatggtgcagcaaggggttctgcatgatgtggtgacatataattcgattcttgatgcgctgtgcaaggcaggagctatggacaaggctgagttgttccttcggcagatggttgatgatgatattcgaccgaatgaagtgacatataatgcaatgatccatggatattccactttgggccagtggaaaagggcgactcaaatgtttagagaaatgacaagccgtggtcttgctccaaatattgttacttggagctcgttgatgacctccctctgcaagcatggaagaagcaaagaagctgcagaaatttttcattccatggctgcaaaaggccacaagcctaacatcgttacgtatcgtgttctgcttcacgggtatgccgctgagggattctttgcagatatgattgatctctttaattcaatcgcaaacaatggtattgtacccgattgccacgttttcaacatattaattaatgcatatgctaaatgtggaatgatggatgaagctatgtcaatgcttactgaaatgcggggacaaggagtgagtccggatgtgttcacctatgcaactgtaatagctgcactttgcagaatgggtaggttgactgatgttatggacaattttaatcggatgattgggaagggagtacaaccgagcaaagttgtttatcactccctaattcagggtttctgtacgcttggtgatctggtgaaagtgaagaagttgatttttgaaataacggacaaaggtattcctcaccctaacattgtcttcttcagttcaataatgcatagtctgtgcaacgaaggaagggttatggacgcacaccatatctttgacttggttatagacattggtgagagacctgatctcattacatttaatatgctgattgacggatattgcttagtcagcaagatggaggaagcactccgactacttgattccatggtatcagctggcattaagccaaatgtgattacatataatacacttattaatggctattgtaggagtggaaggcttgatgatggcgttattctattcagagaaatgttgcataccagagttaaacctaacactgttacatataacatcatactggatgggttatttcgtgctggaagaactgttgctgcaaaaaagatgttccatgagatgatcgaaactggaacagcagtgagcatttccacatacagcatagttcttggaggactttgtaggaataactgcaccgatgaagcaatcgcttttttccagaaattagttgcaatgaatgtgaagttcgatattgtgatactcaataccatgattaaggcaatgtacaaggttcagagaagagaagaagctaacgatttgtttgcttcattaccagcctgtgggctggtacctaatgcctctacttacggagtagtaatacagaatcttctgaaagaaggatcgttggaagaagctgacaatatgttttcatcaatggagaagagtggttgtgctccaagctctcgtcttgtaaatgatatcaccagaaaattattggaaaagggggagatagtcaaggccggaaattatatgtcgaaagttgacgggaagatcatctcctttgaagcttcaaccacttcgttgttgttgtctctcttttcggagaaaggcaaatatcgggaacaattacaattgctccccgcgaaataccaattttttgagggagtcatt

SEQ ID NO: 2060 - DNA, 1821 bp, Triticum aestivum; identical to SEQ ID NO: 2058
  source 1..1821: mol_type = genomic DNA

SEQ ID NO: 2061 - DNA, 1821 bp, Triticum aestivum; identical to SEQ ID NO: 2055
  source 1..1821: mol_type = genomic DNA

SEQ ID NO: 2062 - DNA, 921 bp, Triticum aestivum
  source 1..921: mol_type = genomic DNA
atgtccaagcttggttgtgtgcctgatgccatctcatacaacacagttcttaagagcttatgtgataatagcagcagccagcgggcgctcgacctccttcagatgatgatgaaaggaggtggctgctcccctgacgtagtgacatacaacacggtcatccatggcttcctgcaggaaggggaagtaagcaaggcatgcgatcgataccatgaaatggtgcagcaaggggttctgcatgatgtggtgacatataattcgattcttgatgcgctgtgcaaggcaggagctatggacaaggctgagttgttccttcggcagatggttgatgatgatattcgaccgaatgaagtgacatataatgcaatgatccatggatattccactttgggccagtggaaaaaggcgactcaaatgtttagagaaatgacaagccgtggtcttgctccaaatattgttacttggagctcgttgatgacctccctctgcaagcatggaagaagcaaagaagctgcagaaatttttcattccatggctgcaaaaggccacaagcctaacatcgttacgtatcgtcttctgcttcatgggtatgccgctgagggattctttgcagatatgattgatatctttaattcaatggcaaacaatggtattgtacccgattgccacgttttcaacatattaattaatgcatatgctaaatgtggaatgatggatgaagctatgtcaatgcttactgaaatgcggggacaaggagtgagtccggatgtgttcacctatgcaactgtaatagctgcactttgcagaatgggtaggttgactgatgctatggacaattttaatcggatgatcgggaagggagtacaaccgagcaaagttgtttatcactccctaattcagggttctgtatgcatggtgatctgg

SEQ ID NO: 2063 - DNA, 2088 bp, Triticum aestivum; identical to SEQ ID NO: 2059
  source 1..2088: mol_type = genomic DNA

SEQ ID NO: 2064 - DNA, 1395 bp, Triticum aestivum; identical to SEQ ID NO: 2056
  source 1..1395: mol_type = genomic DNA

SEQ ID NO: 2065 - DNA, 777 bp, Triticum aestivum; identical to SEQ ID NO: 2054
  source 1..777: mol_type = genomic DNA

SEQ ID NO: 2066 - DNA, 2088 bp, Triticum aestivum; identical to SEQ ID NO: 2059
  source 1..2088: mol_type = genomic DNA

SEQ ID NO: 2067 - DNA, 1821 bp, Triticum aestivum; identical to SEQ ID NO: 2055
  source 1..1821: mol_type = genomic DNA

SEQ ID NO: 2068 - DNA, 2088 bp, Triticum aestivum; identical to SEQ ID NO: 2059
  source 1..2088: mol_type = genomic DNA

SEQ ID NO: 2069 - DNA, 1707 bp, Triticum aestivum
  source 1..1707: mol_type = genomic DNA
atgatcaacctgggagttcaacctgatgcggtgacctacagctcatttatcaacgcactaagcaagtccggagcaatggacaaggcagaagtggtccttcggcaaatggttgatcaaggcattgtacccaatatcattacgtatactagtctgatccatgaatattccacttcgggtcagtggaaagcagcagttaggatattcaaagaaatgacaagtaccggtgttcgaccaaattctgtcacgttgaactcatttattgattccctttgcaagcatagaaagacaaaggaagctagagatatttttgactccatggccgcaaacggccacaaacctgatattttctcctactctactttgcttaacgggtatgtgaaagaaggatgcttcgatgatatgactgatctcttcaattcgatggtacggaatggtattgtacctaaccaccatgttttcaacatactgatcaatgcatatgctaaacgtggactgatggataaggctatgcacatgttcgaagtaatgaggcaacaaggagtaaacccagatgtatttagctatcaaattgtaatggattcactttgcaaaatgggcaggatggatgccgctctggacaaatttaatcagatggtcaatcaaggagtttcacctaacaaagctgtttaccaatgcctggttctgggttcttgctctcatggtcattttgtgaaagccaaggaattgatctctgaagcaattaatagaggtctgtattctaacagtgtgttcttctatcgtgtaataaacgacctttgcaaagaaggaaaggtaaacgaggcacaggatatgtttgacttcatcctaggtattggtcagcgacctgatgtgattatgtacacttcactgatggatggatattgccttgttggcgaggtggagaaagcactgagtgtactcgatgctatgaaatctgctggccttcaacctgatgatgttgtatatggtacacttcttaacggttactgtaaaattggaaggattgccgatggattgagccttttcagggaaatgtcactcagcgtggttaagcccacgactattatatacaacattatactggatgggctgttttgctctgggagaacagtttgtgcaaaggaaaattttgatatgatgattgaaagtggcataccagtgggcgttgacacatacaatatagttcttcatggactttgtagaaacaattgcactgatgaagcaatagagctgttcaagaaattatgtgctatgaatgtgaagattaatgtcataacactcaataccatgatttctgcattgtttaaaactaggagaattgaagaagccaaggatttgtttgctactatatcagccattgggttggtgccttctgttgtgacttacagtgtaatgatgacaaatttcataaaagaagggttgctggcagatgctgatgatatgttttcagcaatggagaaggctggctgtgctcccaactccagactgctaaatcaagtggtcagggtatttctgaagaatggtgaagttgtaaaggctgtgacttatcttgctaaacttgatgcaaaacagctgtcacttgaagcttcgacggtttcgttaatagtatctctcttctcaaggaaagggaaattaaggaagcatgtaaaattgcttccggtaaagtaccagcctcctgagatgttggac

SEQ ID NO: 2070 - DNA, 1884 bp, Triticum aestivum
  source 1..1884: mol_type = genomic DNA
atggactgttgctgccgcgcacaccgcctcgatctggcatttgctttcttcggccgtctcctcaggacgggactgaaggcaggcgtcatagaagtcaacactctcctcaaaggactctgccacacaaagcgggcggatgaggccatggaagtgcttcttcacaggatgcctgagctgggctgcacccctgacgtggtggcatataccacggtcatccatggcttctttaaggaaggccaagtaggcaaggcatgcagcctgttccatggcatggcgcagcagggcgttgcgcctgatgtcatgacatatagctcggttattgatgcgctgtgcaaggccaaagcaatggacaaggcagagtatttccttcgtcagatggttgataatggtgtcgtacctgataatgtcacatataatagcctcatccacggatattcctcttcaggccattggaaggaggcggtaagggtgctgaaagaaatgacaagtcaaggtatcatacctgatatcgtttcataccgtattctgcttcatgggtatgccaccgaagggtgcttagttgatatgattaatctcttcaattcaatggcaagatactgtattctacctgattgtcatatcttcaacatactgattaatgcatatgctaaatctgggaagcttgataaggctatgcttatatttagagaaatgcagaaacaaggagtgagtccagatgcagtcacatattcaaccgtaatacatgcattttgcaaaaatggcaggttggacgatgctgtgataaagtttaatcaaatgattgatacaggagtacaaccgaacacatctgtttataatgccctaatccaggggttttctacgaatggcgatttggtgaaggcaaaggaattggttacggaaatgatgaacaaaggtatgcatcctcctgatattaaggtcttccattcggtaatgcagaacctatgcacagaaggaagggtaacagaagcacgggatatccttgacttgatagtgcacataggtatgaggcctgatgttttcacatttactttactgattggtggatactgcctagtcggcaagatggaggatgcctcaaaaatatttgatgatatgatgtcatatggtttagaaccttgtaacattacgtatggtatacttattaatggctattgcaaaaatagaaggattgatgacgggcttattctgttcaaagagatgctgcacaagggacttaaacctacaacttttaattataacgtcatactggatggattatttctggctggacgaactgttgctgcaaaggaaaagtttgacgagatggttgaatctggagtaagtgtgtgcattgatacatattcgatagttcttggtggactttgtagaaataattgtagcggcgaagccattacgctattccagaaattaagcaaaatgaatgtgaaattcaatattagaattgtcaatttcatgattgatgccttcttcagggttcagcgaaagcaagaagctgaggatttgtttgctgcaatatcagcaaatgggttggttgctaatgtttttacctacagcctaatgatgacaaatcttataaaagaagggtcagcggaaaaagctgacactctctttttatcgatggagaagagcggctgtactgccaactcgtggatgttaaatcttattatcagaaggctactggaaaaaggagagatagtgaaggctggaaattatatggctaaagttgatgcaaagagctactcacttgaagctaaaactgtttcgctgctgatttctctcttttcagggaaagggaaatacagagaacacataagattgctgcctacaaagtatcagtttcgtgaagaagcagccacagttgaa

SEQ ID NO: 2071 - DNA, 2004 bp, Triticum aestivum
  source 1..2004: mol_type = genomic DNA
atggattgctgctgctgccgcgcacaccgcctggatctggcgctcgccttcttcggccatctcctcaagacgggcctggaggcagaccaagtcgtcttcaacaccctcctcaaaggcctttgccacgcaaagcgggcggatgaggctctggacgtgctgcttcacaggatgactgagctgggctgcacccccaacgtggtggcgtataacaccataatccatggcttctttaaggaaggtcaagtaagcaaggcatgcaatctgttccatgaaatggcgcagcagggcgttaagcctaatgtggtgacatataactcagttatcgatgcgctgtgcaaggccagagccatggacaaggctgaggtggtccttcgccaaatggttgataatggtgtcgtacctgataatgtcacatataatagcctcatccatggatattcctcttcaggccattggaaggaggcagttagggtattcaaagagatgacaagtcggagggttacagcagatgcgcatacttacaacatgtttatgacctttctttgcaaacatggaagaagcaaacaagctgcaggaatttttgattccatggctatgaagggcctgaaacctgacaacatttcatatgctattctccttcatgggtatgccaccgaaggatgcttagttgatgtgattaatctcttcaattcaatagaaagagactgtattctaccagactctcgtatcttcagcatactgattaatgcatatgctaaatctgggaagcttgataaggctatgcttatatttagagaaatgcagaaacaaggagtgagcccagatgcattcacatattcaactttaatacatgcattttgtaaaaagggtcggttggacgatgctatgataaagtttaatcagatggttgatacaggagtacgacagggcacagctgtttatggttctctaatccagggtttttgtacacacggcgatttggtgaaaggaaaggaattggttactgaaatgatgaacaaaggtatacctcctcctgatattatgttcttccattcaatcatgcagaacctatgcacagaaagaagggtagtagaagcacgggatatccttggcttgatagcacacataggtatgaggcctaatgtttgcacatttaatatactgattggtggatactgcctagtccgcaagatggaggatgcctcaaaaatatttcatgatatgatgtcatatggtttagaaccttctaatgttacgtatggtatacttattaatggctattgcaaaaacagaaggattgatgacgggctgattctgttcaaagaaatgttgcgcaagggacttaaacctacaacttttaattacaacatcatactggatggattatttctggctggacgaactgttgctgcaaaggaaaagtttgatgagatggttgaatctggagtaagtatgtgcatcagtacttactctatagttcttcgtggactttgtagaaataattgtagcggcgaagccatcacgctattccagaaattaagcgcaatgcatgtgaaattcaatattagaattgtcaatatcatgattgatgccttcttcagggttcagcgaaagcaagaagctaaggatttgtttgctgcactaacagccaatgggttggttgctaatgtttttacctacagcctaatgatgacaaatcttataaaagaagggtcagtggaagaggctgacacactctttttatcgatggagatgagcggctgtacttcgaactcgtggatgttaaatcttattatcagagggttgctggaaaaaggagagatagtcaaggctggatgttatatgtctaaagttgatgcgaagagctactcacttgaagctaaaactgtttcgttgctgatctatctcttttcagggaaagggaaatacagagaacacataagattgctacctacaaagtatcagtttctcgaagaagcagccacagttgaatggtttgctata

SEQ ID NO: 2072 - DNA, 2004 bp, Triticum aestivum; identical to SEQ ID NO: 2071
  source 1..2004: mol_type = genomic DNA

SEQ ID NO: 2073 - DNA, 2004 bp, Triticum aestivum; identical to SEQ ID NO: 2071
  source 1..2004: mol_type = genomic DNA

SEQ ID NO: 2074 - DNA, 1680 bp, Triticum aestivum
  source 1..1680: mol_type = genomic DNA
atggactgctgctgccgcgcacaccgcgtggatctgacgctggccttcttcggcggtctccttaggacgggcttggaggcagaccaagtcatcttcagcaccctcctcaagggactctgccacgcaaagcgcacagatgaggctctcaacgtcctgcttcacaggatgactgagttgggctgcacccctaacgtggtggcgtatagcacggtcatccatggcttcttcaaggaaggccaagtaggcaaggcgtgcagcctgttccatgaaatggcgcagcagggcgttgcgcctaatttggtgacatatacctcggttattgatgcgctgtgcaaggccaaagcaatggacaaggcagagtatttccttcgtcagatggttgataatggtgtcgtacctaataatgtcacatataatagcctcatccatggatattcctcttcaagccattggaaggaggcggttagggtattcaaagagatgacaagtcggagggttacagcagatgtgcatacttataacatgtttatgacctttctttgcaaacatggaagaagcaaagaagctgcaggattttttgattccatggctatgaagggcctgaaacctgacaacgtttcatatgctattctccttcatgggtatgccaccgaaggatgcttagttgatatgattaatctcttcaactcaatggaaaaagactctattctacctaactgtcatatcttcagcatactgattaatgcatatgctaaatctgggaagcttgataaggccatgcttatcttcagtgaaatgcagaaacaaggagtgagtccagatgcagtcacatatttacccgtaatagatgcattttgcaaaaagggtaggttggacgatgctgtgattaagtttaatcagatgattgatatgggagtacgaccagacacagctgtttatacttccctaatccaagttttttgtacacacggcgatttgctgaaagcaaaagaattggttactgaaatgatgaacaaaggtatacctcctcctgatattaagttcttccattcaatcatgcagaacctatgcacagaaggaagggtaatagaagcacgtgatatccttggcttgatagcacacataggtatgaggcctaatgtttgcacatttaatatactgattggtggatactgtctagtccgcaagatggaggatgcctcaaaaatatttgatgatatgatgtcatatggtttagaaccttctaatattacgtatggtatacttattaatggctattgcaaaaacttaaggattgacgatgggctgattctgttcaaagaaatgttacggaagggagttaaacctacaacttttaattataacgtcatactggatgggttatttctggctggacgaactgttgttgcaaaggaaaagtttcatgagatggttgaatctggagtaagtgtgtgcatcggtacttactctatagttcttggtggactttgtagaaatagttgcagtagcgaagcagtcacactattccagaaacgaaaaggtgcgatagcacccgggagtctagactcccttttatctggtccgtacagccttgtaaagattcgtgccaggctctgtatagcagcagctcatttgcagcgtcaggatttgaccgcgacaaacaatagtgctcgtaggctg

SEQ ID NO: 2075 - DNA, 1650 bp, Triticum aestivum
  source 1..1650: mol_type = genomic DNA
atgcactcaaatgaggcattggatctgctgctccaccggatgcccgaactggactgtgcgcctgatgtcttctcgttcaacatagtaatcaacggctgctttagagaaggtgaagtagacaaagcatgcaatctcttccatgagatgccccaactgggagttcaacctgatgtggtgacctacaactcaattatcatcgcactaagcagggccggagcaatgggtaaggcagaagtggtccttcggcaaatggttgataaaggcattggacctgatgtcatgacatataacagtctgatccatggatattctactttgggtcagtggaaggcagcagttagggtattcaaagagatggtaagtgttggtgttctaccaaatgctgtcacgttgaactcatttatggattcactttgcaagcatagaaggacaaaggaagctagagatatttttgactccatggctgcaaagggccacaaacctaatattgcctcctactctactatgcttaatgggtatgcgaaacaaggatgcttcgatgatatgactggtctcttcaattccatggtacagaatgatattgtacctaacaaccatgttttcaacatactgatcagagcatattctacacgtggactgatggacgaggctatgcacatgttcgaagtaatgaagcaacaaggagtaaacccagatgtagttgactatctagtagtaatagattcactttgcaaaatgggcaggatggatgctgctatggacaaatttaatcagatggtcaatcaaggagtttcacctgacatagttgtttaccaatgcctggttctgggttcttgctctaatggtgattttgtgaaagccaaagaattgatttctgaagcagttaatcgaggtctgtgttctaacagtgtgttcttctatcctgtaataaacaacctgagcaaagaaggaaatgtaaaggatgcacaagatatgtttgacttcattgtaggtattggtcatcagcctgatgttattatgtacaattcactgatggatggatattgccttgttggcaaggtggaggaagcaatgacagtgcttgatgctatgaagtccgctggcctccaacctgatgctattacgtatgctatacttcttaatggctactgtaaaattggaaggatcgacgatggattgagtctttttagggaaatctcactcagcagggttaagcccacgactattatgtacaacattatacttgatgggctgttttgctgtgggagaacagtttttgcaaaggaagaattcgatacaatgattgaaagtggcataccggtgggcattgacacatgcaccatagttcttagtggactttgcaaaaataattgcactgatgaagcaatagagctgttcaagaagttatgtgcaatgaatgtgaagtttgatgtcataattctcactaccatgatttctgcaatgtttaagactaggagaattgaagaagccaaggatttgtttgctactatatcaaccatagggttggtgccttctgttgtgacttacagtgtaatgatgacgaatttcataaaagaagggtcgctggsmswskctgatkatatgttttwagcratggagaaggctrkywktctsgaggaccttacarag

SEQ ID NO: 2076 - DNA, 1857 bp, Triticum aestivum
  source 1..1857: mol_type = genomic DNA
atgcactcaaatgaggctttggacatgctgctccaccggatgcccgaactggactgtgcgcctgatgtcttctcgttcaacatagtaatcaacggctgctttagagaaggtgaagtagacaaagcatgcaatctcttccatgagatgccccaactgggagttcaacctgatgtggtgacctacaactcaattatcatcgcactaagcagggccggggcaatgggtaaggcagaagtggtccttcggcaaatggttgataaaggcattggacccgatgtcatgacatataacagtctgatccatggatattctactttgggtcagtggaaggcagcagttagggtattcaaagagatggtaagtgttggtgttctaccaaatgctgtcacgttgaactcatttatggattcactttgcaagcatagaaggacaaaggaagctagagatatttttgactccatggctgcaaagggccacaaacctaatattgcctcctactctactatgcttaatgggtatgcgaaacaaggatgcttcgatgatatgactggtctcttcaattccatggtacagaatggtattgtacctaacaaccatgttttcaacatactgatcagagcatattctacacgtggactgatggacgaggctatgcacatgttcgaagtaatgaagcaacaaggagtaaacccagatgtagttgactatctagtagtaatagattcactttgcaaaatgggcaggatggatgctgctatggacaaatttaatcagatggtcaatcaaggagtttcacctgacatagttgtttaccaatgcctggttctgggttcttgctctaatggtgattttgtgaaagccaacgaattgatttctgaagcagttaatcgaggtctgtgttctaacagtgtgttcttctatcctgtaataaacaacctgagcaaagaaggaaatgtaaaggatgcacaggatatgtttgacttcattgtaggtattggtcatcagcctgatgttattatgtacaattcactaatggatggatattgccttgttggcaaggtggaggaagcaatgacagtgcttgatgctatgaagtccgctggcctccaacctgatgctattacgtatgctatacttcttaatggctactgtaaaattggaaggatcgacgatggattgagtctttttagggaaatctcactcagcagggttaagcccacgactattatgtacaacattatacttgatgggctgttttgctgtgggagaacagtttttgcaaaggaagaattcgatacaatgattgaaagtggcataccggtgggcattgacacatgcaccatagttcttagtggactttgcaaaaataattgcactgatgaagcaatagagctgttcaagaagttatgtgcaatgaatgtgaagtttgatgtcataattctcactaccatgatttctgcaatgtttaagactaggagaattgaagaagccaaggatttgtttgctactatatcaaccatagggttggtgccttctgttgtgacttacagtgtaatgatgacgaatttcataaaagaagggtcgctggcagaggctgatgatatgtttttagcaatggagaaggctggctgtgctcctgactccagactgctaaatcacgtggtcagagtgttgctggagaaaggtgcagttgtaaaggctgcaacttatctcgctaaacttgatggaaaacagctgtcacttgaagcttcgacggtttcgttaatagtatctctcttctcaaggaaagggaaattaagggagcatgtaaaattgcttccggtaaagtaccagcctcctgagagttcgactgacaat

SEQ ID NO: 2077 - DNA, 1566 bp, Triticum aestivum
  source 1..1566: mol_type = genomic DNA
atgcactcaaatgaggcattggatctgctgctccaccggatgcccgaactggactgtgcgcctgatgtcttctcgttcaacatagtaatcaacggctgctttagagaaggtgaagtagacaaagcatgcaatctcttccatgagatgccccaactgggagttcaacctgatgtggtgacctacaactcaattatcatcgcactaagcagggccggagcaatgggtaaggcagaagtggtccttcggcaaatggttgataaaggcattggacccgatgtcatgacatataacagtctgatccatggatattctactttgggtcagtggaaggcagcagttagggtattcaaagagatggtaagtgttggtgttctaccaaatgctgtcacgttgaactcatttatggattcactttgcaagcatagaaggacaaaggaagctagagatatttttgactccatggctgcaaagggccacaaacctaatattgcctcctactctactatgcttaatgggtatgcgaaacaaggatgcttcgatgatatgactggtctcttcaattccatggtacagaatgatattgtacctaacaaccatgttttcaacatactgatcagagcatattctacacgtggactgatggacgaggctatgcacatgttcgaagtaatgaagcaacaaggagtaaacccagatgtagttgactatctagtagtaatagattcactttgcaaaatgggcaggatggatgctgctatggacaaatttaatcagatggtcaatcaaggagtttcacctgacatagttgtttaccaatgcctggttctgggttcttgctctaatggtgattttgtgaaagccaaagaattgatttctgaagcagttaatcgaggtctgtgttctaacagtgtgttcttctatcctgtaataaacaacctgagcaaagaaggaaatgtaaaggatgcacaagatatgtttgacttcattgtaggtattggtcatcagcctgatgttattatgtacaattcactgatggatggatattgccttgttggcaaggtggaggaagcaatgacagtgcttgatgctatgaagtccgctggcctccaacctgatgctattacgtatgctatacttcttaatggctactgtaaaattggaaggatcgacgatggattgagtctttttagggaaatctcactcagcagggttaagcccacgactattatgtacaacattatacttgatgggctgttttgctgtgggagaacagtttttgcaaaggaagaattcgatacaatgattgaaagtggcataccggtgggcattgacacatgcaccatagttcttagtggactttgcaaaaataattgcactgatgaagcaatagagctgttcaagaagttatgtgcaatgaatgtgaagtttgatgtcataattctcactaccatgatttctgcaatgtttaagactaggagaattgaagaagccaaggatttgtttgctactatatcaaccatagggttggtgccttctgttgtgacttacagtgtaattttttttttt

SEQ ID NO: 2078 - DNA, 1896 bp, Triticum aestivum
  source 1..1896: mol_type = genomic DNA
atggcattccagtcgactgctgctgccgtgctggccgcttggaccttggacactgctgccatgggacacgtcattaagttgggatttgcagaagaatctattgtcaatttcagccacctactcaaggccatctgtgcggagaagaagaccagctgtgcaatggacatcgtactacgagtaatgcctgagcttaactgcacacccaacattttctcctacagcattcttttcaagggtctctgcaacgagaagagaagccaagaggctctcgacctgattcacatcatggttgagcatggaggtagctgccaacctaatgtggtgtcctatagcaccgtaattgatggcttgttgaaagagggtgaagtgaacaaggcttacagtctattttgtgaaatgttacagaggagaatttcgccggatgttgtgacctgtagttcgattatttctggcatgtgcaagcttcatgcgatggacaaggctgaggacgttcttcaacagatgcttgatagaggaattctgccagatgttgctacatatactagtctaatgcatggatattattcattaggacagtgcgaggaggtggatcggattttcaaagaaatgtctagaaatggtgttcaaccagatattgtaacttctaatatacagatggattatctttgcaagaatggaagatgtgcagaagctaggaagatttttgattccatggtcagtttgggccaaaaaccgactgttactacctacagtattctgcttcatgggtatgctatggaaagatcttttcatgatatgaattgtctcattgatttgatggtgggaaatggtattgcgccaaatcattttatctacaacatactcatatctgcatacgctaaagaagaaatggttgatgatgtattgcatatatttacaaaaatgcggcagcaaggattgaaccctaatgttgtgaactatggagctgtaataaacttgctttccagttttggccgaatggatgatgctatgtcccaattcaatcaaatgatagctgaagggttagctcctgatatcatagtttttaaccctcttattaggggtttctgttcttgtggcaaatggaagaaggttcatgaactattttctgagatgttggatcgcggcatctatcccaacacagtgttcttcaacacaattatggatcgcctttgcaaatatggaagggttatggaagcccaagatctcttcgacctgatggtacacatgggtgtgaagcctgatgtgtgtacttataacacactgataggtggatacttgttcgttggtaagatggatgaagtgagcaagttacttgacaatatggtctcaattggcatggaaccagatgttatcacctataacatactgattgatggttactctaagaatggaaggatagatgatgcattggttgtttccagggaaatgttggccgggaaggttaagccttgtgttatcacttttaatattatgattggtgcattgcttaaatgtggcaggaaggaagaggctaaagatttgtttgatggtatctgggctaaaggattagtgcccaccgttgttacatatagcttaatgatacaaaaacttatagaagaaggttctctacaagagtctgatgatctatttgtttctatggagaagaatggatgtgctgccgactcccatatgctaaatgctatagttagaagcttatttcggaaaggggaggtgcccagggctgggacttatctgtctaaaattgatgagaggagcttcacccttgaagcttccacagctagcttgttgactgcacttgcttcagggggaaaaggccaggaatacaaggagttactccccgaaaaataccactcttttctggaacagggcactgat

SEQ ID NO: 2079 - DNA, 1896 bp, Triticum aestivum; identical to SEQ ID NO: 2078
  source 1..1896: mol_type = genomic DNA

SEQ ID NO: 2080 - DNA, 1896 bp, Triticum aestivum; identical to SEQ ID NO: 2078
  source 1..1896: mol_type = genomic DNA

SEQ ID NO: 2081 - DNA, 1938 bp, Triticum aestivum
  source 1..1938: mol_type = genomic DNA
atgtccgagctcggctgtgtgcataatgccttctcatactccattgttctgaagagcttatgcgacaatagcatgagtcagcgggggctcgacatgctccagatgatggcgaaagaaggaggtgtctgcttccccaacgtggtggcatatagcacggttatccatggcttctttaaggagggcgaaacaggcaaggcatgcaatctcttccacgaaatgatgcagcaagggcttgtgcccgatgtggtgacatacaactcaatcattgacgcgttgtgcaaggccagggcaatggacaaggcagagctagtccttcggcagatggttgctaatggtgctcaacccgatacagtgacatataattgcatgatcaatggatatgccacatctgggcggttgaaagagtctgctaaaatgttcagagaaatgaaaagccggggtcttatgccagatattgttacttgcaactccttcctgtcctccctttgcaagcatggaagaagcaaagaagctgcagaattttttgattccatgaccgccaagggccacaaaccggatatcgtctcatgccgtattttgcttcatgggtatgctactgaaggatgctttgctgatatgattgatctctttaactcagtgggaagcaacggcattgcagccgactgccgtgttttcaaaatattaattaatcgatatgctaaacgtggaatgacagatgaagctatgctgatatttactgaaatgcggggacaaggagtaagtccaaatgtagtcacctattccattgtaatagccgcactttccagaaaactttccagaatgggtaggttgaccgatgctatggacaaatttgatcagatggttgccttgggagtacagccggatagatctatttatcagtcccttattcagggcttttttatgcatggtggtttggttaaagctaaggagttggtttctcaaatgataaacaaaggtattcctcgtcctgacattgtgttcttcaattcagtaataaacagtatgtgcaaggaaggcagggttatggatgcacatgatatctttgacttggttatagacataggtgagaggcctgatgacatttcatttaattcactgattgacggatattgcttagtcgggaatatggataaagcatttaagatacttgatgccatggaagttggtgttgagcctgatgttattacatataatacacttgttaatggctattgtagaaatggaaggatcgatgatggtttggctctgtttagagaaatgccgcataagagaattaaacctgacactgtaacatatgacatcatactgaatgggttgtttcattctgggagcactgttgctgcaagaaaaatgttccatgagatgatcgaaagtggaataacagtgagcattcccacatatggtataataattgctggtttttgtagaaataattgtgcagaggaagctatcgacctattccataaactaagtgctatgaatgtgaagtttgatattgcaatacacaatactatgattaatgcgatattcaaggttgggagaagagaggaagctaaggatttgtttgctgcaatatcacccagtgggttggtgcccacggaatctacttatgcagtaatgataacaaatcttctagaagatggagtagtggaagaagcagacaatatgttttcatcaatggagaaaagtggtataatccccagctcccgtctgttaaattgtatcatcagaatgttgttggaaaaaggtgagattgccaaggccggaaattacttgtctaaagttgatgggaagagcattttacttgaagcatcaacaactttattgatgttgtctttgttttcgaagaaaggcaaataccgggaggacatgaaattgctccctgcaaagtatcaattttttatggacttggttgac

SEQ ID NO: 2082 - DNA, 1938 bp, Triticum aestivum
  source 1..1938: mol_type = genomic DNA
atgtccgagctcggctgtgtgcataatgccttctcatactccattgttctgaagagcttatgcgacaatagcatgagtcagcgggggctcgacatgctccagatgatggcgaaagaaggaggtgtctgcttccccaacgtggtggcatatagcacggttatccatggcttctttaaggagggcgaaacaggcaaggcatgcaatctcttccacgaaatgatgcagcaagggcttgtgcccgatgtggtgacatacaactcaatcattgacgcgttgtgcaaggccagggcaatggacaaggcagagctagtccttcggcagatggttgctaatggtgctcaatccgatacagtgacatataattgcatgatcaatggatatgccacatctgggcggttgaaagagtctgctaaaatgttcagagaaatgaaaagccggggtcttatgccagatattgttacttgcaactccttcctgtcctccctttgcaagcatggaagaagcaaagaagctgcagaattttttgattccatgaccgccaagggccacaaaccggatatcgtctcatgccgtattttgcttcatgggtatgctactgaaggatgctttgctgatatgattgatctctttaactcagtgggaagcaacggcattgcagccgactgccgtgttttcaaaatattaattaatcgatatgctaaacgtggaatgacagatgaagctatgctgatatttactgaaatgcggggacaaggagtaagtccaaatgtagtcacctattccattgtaatagccgcactttccagaaaactttccagaatgggtaggttgaccgatgctatggacaaatttgatcagatggttgccttgggagtacagccggatagatctatttatcagtcccttattcagggcttttttatgcatggtggtttggttaaagctaaggagttggtttctcaaatgataaacaaaggtattcctcgtcctgacattgtgttcttcaattcagtaataaacagtatgtgcaaggaaggcagggttatggatgcacatgatatctttgacttggttatagacataggtgagaggcctgatgacatttcatttaattcactgattgacggatattgcttagtcgggaatatggataaagcatttaagatacttgatgccatggaagttggtgttgagcctgatgttattacatataatacacttgttaatggctattgtagaaatggaaggatcgatgatggtttggctctgtttagagaaatgccgcataagagaattaaacctgacactgtaacatatgacatcatactgaatgggttgtttcattctgggagcactgttgctgcaagaaaaatgttccatgagatgatcgaaagtggaataacagtgagcattcccacatatggtataataattgctggtttttgtagaaataattgtgcagaggaagctatcgacctattccataaactaagtgctatgaatgtgaagtttgatattgcaatacacaatactatgattaatgcgatattcaaggttgggagaagagaggaagctaaggatttgtttgctgcaatatcacccagtgggttggtgcccacggaatctacttatgcagtaatgataacaaatcttctagaagatggagtagtggaagaagcagacaatatgttttcatcaatggagaaaagtggtataatccccagctcccgtctgttaaattgtatcatcagaatgttgttggaaaaaggtgagattgccaaggccggaaattacttgtctaaagttgatgggaagagcattttacttgaagcatcaacaactttattgatgttgtctttgttttcgaagaaaggcaaataccgggaggacatgaaattgctccctgcaaagtatcaattttttatggacttggttgac

SEQ ID NO: 2083 - DNA, 1938 bp, Triticum aestivum; identical to SEQ ID NO: 2081
  source 1..1938: mol_type = genomic DNA

SEQ ID NO: 2084 - DNA, 1914 bp, Triticum aestivum
  source 1..1914: mol_type = genomic DNA
atgagccgccgctttgtccccctcgacagacgcatcttggagcggaacatcaaggctcggtaccacgccggagacattggcacccaggacgcactccacctgttcgacgaattgctccacgttgctgggccttcctcggtccgcgccatcaactgcctcctcaccgtggttggccgtgattgccccgcgctcggcgtctccctcttcaaccgcgtcgcaagagcaaaggtgcctccccacaatgtcacctatggcattctagtcgactgctgctgccgtgctggccgcctggaccttggacacgctgccatgggacgcgtcattaagttgggatttacagcagaagctatcgtcaatttcagccacctactcaaggccatctgtgcagagaagaagaccagttatgcaatggacatcgtactccggataatgcctgagtttaactgcataccaaacattttctcctataacattcttttcaagggtctctgcaacgagaagagaagccaagaggctcttgatctgattcaagttatggttgaggatggaggttgctgccaacctgatgtggtgacctataacactgtaattgatggcttgttgaaagagggtgaggtaggcaaggcttacagcctattttctgaaatgctgcgtcagggggtatcaccgaatgttgtgacatgtaattcaatcatctctggcatgtgcaagcttcacgcgatggacaaggctgaggaggttcttcaacagatgcttgatagaggaattctgccagatgttgccacatataatagtctgatacatggatattattcattaggacagtgcgaagaggtggatcggattttcaaggagatgactacaaatggtgttcaaccagatattgtaacttacaatatacagatggattatctttgcaagaatggaagatgcgcagaagctaggaagatttttgattccatgatcagtttgggccaaaaacctactgttactacctacaacattctgcttcatgggtatgctatggaaagatcttttcatgatatgaattgtctcattgagttgatggatgataatggtatttcaccagatcattatggctacaacatactcatatctgcttatgctaaagaaaaaatggttgatgatgtattgcatatatttacaaaaatgcggcagcaaggattgaaccctgatgttgcgaactatggagcggtaataaacttgctttctagtattggccgaatggatgatgctatgtcccaatacaatcaaatgataaatgaagggttagctcctgatatcatagttttcaactcccttattagtggtttctgttcttgtggcaaatgggagaaggttcatgaactattttctgagatgttggatcgcggcatctgtcccaacacagtgttcttcaccactattatggaccgcctttgcaaaaatggaagggttatggaagcccaagatctcttcgacctgatggtacacatgggtgtgaagcctgatgtgtggacttataacacactgataggtggatacttgttcattggtaagatggatgaagtgagcaagttacttgacaatatgtgctcaattggcttgaaaccaaatgttttcacctatggcatactgatcgatggttactctaagaatggaagtatagatgatgcactggttgttatcagggaaatgttggacggtgttaagccttctattatcacttttaatattatgattggtgtgttgcttaaaggtagcaggatggaagaagccaaagatttgtttgacggtatctgggccaaaggattagtgcctgacgttgttacatatagcttaatgatacaaaaactaatagaagaaggttctctgactgtagtaaacttcttccatcaagctagtaaacttctc

SEQ ID NO: 2085 - DNA, 1914 bp, Triticum aestivum; identical to SEQ ID NO: 2084
  source 1..1914: mol_type = genomic DNA

SEQ ID NO: 2086 - DNA, 1914 bp, Triticum aestivum; identical to SEQ ID NO: 2084
  source 1..1914: mol_type = genomic DNA

SEQ ID NO: 2087 - DNA, 1845 bp, Triticum aestivum
  source 1..1845: mol_type = genomic DNA
atgagaatcttaaaatatgagacagtgatcacgtcaaccaaatatttaaataccaaacaaattcaaaatatccaacaaaattgcatgatgcatgcttgtacgaacaccacccaatcccatgcactccgagtaaaatgcatggtgcgctcaggcccagcaaatcggatcccagtcgcgccgagtccacacctccgtccaccgtcctcccgccgctggacgcgcccggtcggtcgtcgccggcgcgcgctcggactcaccgtcgccgcaggaagaagcgagcgacaccaccggacgcgcccgtcctccttccaccagagtaaggtcttggtcgttgcctcccgcattcaccgctgcagaaattggacggcgacaatgtcacgccttcaggtccgctctttctccagccccgtttcctcacgcgccaacgatctgctgagcgaactccaaggccatctgggcttcaggacgctcaggccagagctcgcgcaccaactgttcgaccaaatgatgcgccaacctgtcccagtatcagcgcgtgcactcaacggcttatttgctgccctcgcgcgtgcgccgccctccgccgcctgcaccgacggccctgccctcgccatcgatcttttcaaccgcatggcccgagcaggccgccgcagggtgatagcactcaccagtcacacctacagcatactaattgaatgctgctgccgcgtgcgccgtccggacctagggccttccttcttcgctcaccttctcaagacaggcgtcacggcaaacatcgtaatctatagtggcttaatcaagtgcctctgcgacttgaagtgcacagaggaggctctggatgtgctgctccacaggatgccgaacaacataagtgatgccatctcctactcagtaattctcaagagtttctgcgacagtgggaggagccagcttgcgcttgacctgctccacatgatggccaaaaaaggagctgaccactccccggatgtgcttgcatacaacatggtaattgatggcttctttaaggaaggtgaagtaagcaaaacatttgatctgttccatgaaatgatacagcaggggcctgtgcctgatgtggtgacgtatagcttctttatcaatgcgctatgcaaagcaagagcaatggacaaggcagaggtggttcttcgatcaatgattcataatggtgtccaaccagatgctgtgacatataatagcttgatccaaggatttttaacttcgggtcagctgaaagaagcctttaggttgttgaaactgatgacaaggcaaggtgttattccagacgttgttacctgcaactcagtcatggactacctttgcaagcatggaagagtcaaagaagctgcagaaatattttattccacggctgtgaagggccgaaaaccagatatagtctcatactctattatgctccatgggtacgctatagaaggatcccttgttaaaatgattgatctctgtgagatgatggcaagagatggagttgtacccgacctctcttgtttcaacatactgattaaggcatatgctaagtatggcaggatggatgtggccatgcttttctttgaagacatgttgaagcagggtgtgaagcctaatgaactcacttatttaactgtgatatctgcgttttgcaagatgggcaggatggatgatgcgatggaaaaattcagtgagatgattaatatgggagtaccacttgacacagaagtttacatgtgcatggttgagggttatttgaatcttggcgattccatgaaagccaaggaatttattaccaaaatgaagaacagggatattcatcataagccatggaaaggtaatcga

SEQ ID NO: 2088 - DNA, 1806 bp, Triticum aestivum
  source 1..1806: mol_type = genomic DNA
atgcctcgcttctcctccaccacgtcaatgtcgtcactccgcctccgcctccgcctccacgcccgccactcctcctccgcctcgcaaccctcacgcagccagggatgggatccccacgccgccttcgccgccgccacggagcgtgcgcgctccggcaacctcaccccggaggacgcacataacctgttcgacgaattgctgcggcagggcaatcctgtcctggagcgccccctcaacaaccttctcgccgccctcgcccgcgcgccggcgtccagcgcctgcggagacggccctgcactcgcggtcgccctcttcagccgcatatcccaaggtgcccgcctaagggtggcgcatccaacggcttgcacctacagcatcctcatggactgctgctaccgtgcacgctgccctgatctgtcactcgccttcttcggtcgtctcctcaggacgggcctgaaggcagaccaattcgttttcagcaccctcctcaagggactctgccacgcaaagcgctcagatgaggctctggacgtgctgcttcacaggatgcctgagctgggctgcactccctatgtggtggcgtataacaccgtcatccatggcttctttagggaaggccaagtaggcaaggcgtgcaatctattccatgaaatgaggcagcagggcgttacacctgatgttgtgacatataactcggttattgatgcgttgtgcaaggccaaagcaatggacaaggcagagtatttccttggtcagatggttgatgatggtgtcgtacctgataatgtgacatataatagcctcatccatggatattcctcttcaggccactggaaggaggctgttagggtattcaaagagatgacaagtcggagggttacagcagatgtgcatacttacaacatgtttatgacctttctttgcaaacatggaagaagcaaggaagctgcaggaatttttgataccatggctatgaagggcctgaaacctaacatcgtctcgtacagtactctgcttcatgggtatgccaccgaaggatgcttaattgatatgattaatctcttcaattcaatggaaagagactgtattctacctaactgtcatatcttcagcatactgattaatgcatatgctaaatctgggaagcttgataaggctatgcttatcttcaatgaaatgcagaaacaaggattgagtccagacgcattcacatatttacccgtaatagatgcattttgcaaaaagggtaggttggacgatgctatgattaagtttaatcagatgattgatacgggagtacgaccagacacagctgtttatacttccctaatccaaggtttttgtacacatggcgatttggtgaaagcaaaggaattggttactgaaatgatgaacaaaggtatacctcctcctgatattaagttcttccattcaatcatgcaaaacctatgcacggaaggaagagtaacaaaagcatgggatatccttggcttgatagcacacattggtatgaggcctaatgttgtcacatttagtgtacttgtcggtggatactgcctagtccgcaagatggcagatgcatcgaaagtatttgatgatatggtgtcatatggtttagaaccttgtaacattatgtatggtatacttattaatggctattgcaaaaatagaaggattgatgacgggcttattctgttcaaagagatgctgcacaagggacttaaacctacaacttttaattataacgtcatactgaatggattatttctggctggacaaactgttgctgcaaaagagaagtttgat

SEQ ID NO: 2089 - DNA, 1806 bp, Triticum aestivum; identical to SEQ ID NO: 2088
  source 1..1806: mol_type = genomic DNA

SEQ ID NO: 2090 - DNA, 1806 bp, Triticum aestivum; identical to SEQ ID NO: 2088
  source 1..1806: mol_type = genomic DNA

SEQ ID NO: 2091 - DNA, 1806 bp, Triticum aestivum; identical to SEQ ID NO: 2088
  source 1..1806: mol_type = genomic DNA

SEQ ID NO: 2092 - DNA, 1806 bp, Triticum aestivum; identical to SEQ ID NO: 2088
  source 1..1806: mol_type = genomic DNA

SEQ ID NO: 2093 - DNA, 1806 bp, Triticum aestivum; identical to SEQ ID NO: 2088
  source 1..1806: mol_type = genomic DNA

SEQ ID NO: 2094 - DNA, 1854 bp, Triticum aestivum
  source 1..1854: mol_type = genomic DNA
atgagccagcgggcgctcgacctgctccagatgatggcgaaagaaggaggtggctgctcccccaacgtggtggcgtatagcacggtcatccgtggcttttttaaggaaggtgaaacaggcaaggcatgcaatctgttccatgaaatgatgcagcaaggtgttgagcccagtgtgtggacatatagctcaatcattgatgcattgtgcaaggccagagcaatggacaaggcagagctagtgcttcagcagatggttaacaaaggtgttcaacccaataatgtgacatataattgcatgatccatggatattccacatctgggcagtcgaaagaggctgctaaattgcttagagaaatgaaaagccgggaccttataccagatattgtcactcgcaactcgttcctggcctccctttgcaagcatgggagaagcaaggaagctgcagaatttcttgattccatgactgccaagggccacaaaccagatatcgtatcataccgtattttgcttcatgggtatgccagtgaaggatgctttgctgatatgattgatctctttaattcaatggaaagcaacggtattgcagctgactgccatgttttcaacatattaattaatggatatgcaaaacgtggaatgacagaagaagctatgctgatatttactgaaatgcggggacaaggagtgagtccagatgtagtcacctattccattgtaatagccgcactttccagaatgggtaggctgaccgatgctattgagaaattcaatgagatgactgccttggaagtacagccggacacaactgtttatcactcactgattcagggttgttgcatagacggtgatttggttaaagctaaggagctgatgtttgaaatgatgaacggtggtattcctcggcctaacattgtgttcttcaattcagtaataaacagtctgtgcaaagaaggaagggttatggatgcacatgatgtcttagacttggttataggcataggtgagaggcctgatgtcattacatttaattcactgattgacggatattgcttagtcgggaagacggataaagcattcaaaatacttgatgtcatgaaatcagttggtgttgagtctgatgttgttacttatagtgcacttcttgatggctattttaaaaacagaaggattgatgatgctttgactttgtttagagaaatgccgcgtaagagaattaaacctggcactgttacatatggcatcatgttggatgggttgtttcgtgctgggagaactgttgccgcaaagaaaatgttccatgagatgaacgagagtggaacaacggtggacatttccacatacaatataatactgggaggtctttgtagaaataagtgtgcagacgaagcgatcacactgttccagaaattacgagcaatgaatgtgaagttaaatattaaaatactcaataccatgattaatgcaatgtacacggttcaaagaaaggaagaggctaaggatttgttttctgcaatgtcagccaatgggttggtgcccaatgaatctacttatgcagtaatgataagaaatcttctaaaagacggagcagtggaagatgctgacaatatgttttcatcaatggacaacagtggtatcattcccagttcctgtcttataaatgatatcatcagaatgttgttggaaaaaggtgagatagccaaggctggaaattatttgtctaaagttgatgggaagaggatctcacttgaagcttcaactacctcattgatgttgtctctcttttcaaggaaagggaaacatcaggaggatattaagttgctccctgcaaagtatcaatttttcgatggatttggt

SEQ ID NO: 2095 - DNA, 1854 bp, Triticum aestivum; identical to SEQ ID NO: 2094
  source 1..1854: mol_type = genomic DNA

SEQ ID NO: 2096 - DNA, 1854 bp, Triticum aestivum; identical to SEQ ID NO: 2094
  source 1..1854: mol_type = genomic DNA

SEQ ID NO: 2097 - DNA, 1854 bp, Triticum aestivum; identical to SEQ ID NO: 2094
  source 1..1854: mol_type = genomic DNA

SEQ ID NO: 2098 - DNA, 1854 bp, Triticum aestivum; identical to SEQ ID NO: 2094
  source 1..1854: mol_type = genomic DNA

SEQ ID NO: 2099 - DNA, 1854 bp, Triticum aestivum; identical to SEQ ID NO: 2094
  source 1..1854: mol_type = genomic DNA

SEQ ID NO: 2100 - DNA, 960 bp, Triticum aestivum
  source 1..960: mol_type = genomic DNA
atggattatctttgcaagaatggaagatgcgcagaagctaggaagatttttgattccatggtcagtttgggccaaaaaccgactgttactacctacagcattctgcttcatgggtatgctatggaaagatcttttcatgatatgaattgtctcattgatttgatggtgggaaatggtattgctccaaatcattttatctacaacatactcatatctgcatacgctaaagaagaaatggttggtgaggtaatgcatatatttacaaaaatgcggcagcaaggattgaaccctgatgttgcgaactatgaagcggtaataaacttgctttctagtattggccgaatggatgatgctatgtcccaatacaatcaaatgataactgaaggattactccctggtatcatacttttcagccaacttattagtggtttccgtacttgtggcaaatgggagaaggttcatgaactattttctgaaatgttggatcgtggcatctatcccaacactgtgttcttgaacacaattatggatcatctttgcaaaaatggaagggttatggaagcccaggatctcttcgacctgatggtacacatgggtgtgaaacctgacgtgtgtacttatagcacactgataggtggatacttgttcgttggtcagatggatgaagtgagcaagttacttgacaatatggtctcaattggcttgaaaccaaatgttatcacatataccatattgattgatggttactgtaagaatggaaggatagatgatgcattggttgttttcagggaaatgttggccgggaaggttaagccttgcattatcacttttaatattatgattggtgcgttgcttaaaggtggcaggaaggaagaggctaaagatttgtttgatggtatctgggccaaaggattagtgcccaccgttgttacatatagcttaatgatacaaaaacttata

SEQ ID NO: 2101 - DNA, 1863 bp, Triticum aestivum
  source 1..1863: mol_type = genomic DNA
atgagccgccgcgtcgtccccgtcggcaggcgcatcttggagcagaacatcaaggctcggtaccacgccagagacattggcaccgaggatgcactccacctgtttgacgaattgctccaggatgctcagccctcctcgatccatgccatcaactgcctcctcaccatcatccgccgtgattgccctgcactgggcgtctccctcttcaaccgcatcgcaagggccaaggtggcacccgacattatcacctatggcattctagtccaatgctgctgccgtgctggccgcttggaccttggacatgctgccatgggacacatcattaagttgggatttgcagcagaatccatcgtcaatttcaatcacctactcaaagccatctgcgccgagaagaagaccagctacgcaatggacatcgtactccggctaatgcccgagtttaactgcataccaaacattttctcctacaacattcttttcaagggtctctgcaacgagaagagaagccaagaggctcttgagctgattcaaattatggttgaggatggaggttgctgccgacctgatgtggtgacctataacactgtagtcgatggcttgttgaaagagggtgaggtaggcaaggcttacagcctattttctgaaatgctacatagggggatttcgccaaatgctgtgacctatagctcaatcatctgtggcatgtgcaggcttcatctgatggacaaggctgaggaggttcttcaacagatgtttgatagagaaattctgccagatgttgctacatatactagtctaatacatggatattattcattaggacagtgcgaggaggtggatcggattttcaaagaaatgtctagaaatggtgttcaaccagatatcgtaacttataacatacagatggattatctttgcaagaatggaagatgcgcagaagctaggaagatttttgattccatggtcagtttgggccaaaaaccgactgttactacctacagcattctgcttcatgggtatgctatggaaagatcttttcatgatatgaattgtctcattgatttgatggtgggaaatggtattgctccaaatcattttatctacaacatactcatatctgcatacgctaaagaagaaatggttggtgaggtaatgcatatatttacaaaaatgcggcagcaaggattgaaccctgatgttgcgaactatgaagcggtaataaacttgctttctagtattggccgaatggatgatgctatgtcccaatacaatcaaatgataactgaaggattactccctggtatcatacttttcagccaacttattagtggtttccgtacttgtggcaaatgggagaaggttcatgaactattttctgaaatgttggatcgtggcatctatcccaacactgtgttcttcaacacaattatggatcatctttgcaaaaatggaagggttatggaagcccaggatctcttcgacctgatggtacacatgggtgtgaaacctgacgtgtgtacttatagcacactgataggtggatacttgttcgttggtcagatggatgaagtgagcaagttacttgacaatatggtctcaattggcttgaaaccaaatgttatcacatataccatattgattgatggttactgtaagaatggaaggatagatgatgcattggttgttttcagggaaatgttggccgggaaggttaagccttgcattatcacttttaatattatgattggtgcgttgcttaaaggtggcaggaaggaagaggctaaagatttgtttgatggtatctgggccaaaggattagtgcccaccgttgttacatatagcttaatgatacaaaaacttata

SEQ ID NO: 2102 - DNA, 1863 bp, Triticum aestivum; identical to SEQ ID NO: 2101
  source 1..1863: mol_type = genomic DNA

SEQ ID NO: 2103 - DNA, 1866 bp, Triticum aestivum
  source 1..1866: mol_type = genomic DNA
atgaggctctggacattctgcttcacaggatgcctgagcttggctgcacccctgacgtggtggcgtgacgtggtggcgtataacacggtcatccatggcttctttaaggaaggccaagtaggcaaggcatgcaatctgttccatggaatggcgcagcagggcgttgcgcctaatttggtgacatataactcggttattgatgcgttgtgcaaggccaaagcaatggacaaggcagagtatttccttggtcagatggttgatgatggtgtcgtacctgataatgtgacatataatagcctcatccatggatattcctcttcaggccactggaaggaggctgttagggtattcaaagagatgacaagtcggagggttaaaccaaatgtgcatactcacaacatgtttatgacctttctttgcaaacatggaagaagcaaagaagctgcaggaatttttgataccatggctatgaagggcctgaaacataacaacgtttcatatgctattctccttcacgggtatgccaccgaaggatgcttagttgatatgattaatctcttcaattcaatggaaagagactgcattctacctgactgtcgtatcttcagcatactgattaatgcatatgctaaatctgggaagcttgataaggccatgcttatcttcaataaaatgcagaaacaaggagtgagtccaaatgcagtcacatattcaactgtaatagatgcattttgcaaaaagggtcaattggacgatgctatgataaagtttaatcagatgattgatacaggagtacgacagggcacagctgtttatggttctctaatccagggtttttgtacacactgcgatttggtgaaagcaaaggaattgcttactgaaatgatgaacaaaggcatgcttcctcctgatattgcattcttcaattcaatcatgcagaacctttgcacagaaggaagggtaatagaagcacgggatgtccttggcttgatagcgcacataggtgtgaggcctgatgtttgcacatttaatatactgatcggtggatactgcctagtcggcaagatggaacatgcctcaaaaatatttgatgatatgatgtcatatggcttagaaccttctaatattacgtatggtatacttattaatggctattgcaaaaatagaaggattgatgacgggcttattctgttcaaagagatgctgcacaagggacttaaacctacaacttttaattataacgtcatactggatggattatttctggctggacgaactgttgctgcaaaggaaaagtttgatgagatggttgaatctggagtaagtgtgtgcattggtacatattcgatagttcttggtggactttgtagaaataattgctttagcgaagcaatcatgctgttccagaaattaagggcaatgaacatgaaattcaatattagaattgtcaatatcatgattgatgccttctttagggttcagagaaagcaagaagctaaagatttgtttgccgcaataccagccaatggcttggtagctaatgttgttacctacagcataacgatgacaaatcttataaaagaaggttcagtggaagaagctaacactctctttttatcaatggagaagagtggctgtactgccaacgcttggatgttaaatcatactatcagaaggttactggaaagaggagagatagtcaaggctggaaattatatgtctaaagttgatgcaaagagctactcacttgaagctaaaactgtttcattgctgatctctctcttttctgggaaagggaaatatagagaacacataggattgctccctacaaagtatcagtttcgtgaagaagcggccacagttgaa

SEQ ID NO: 2104 - DNA, 1866 bp, Triticum aestivum; identical to SEQ ID NO: 2103
  source 1..1866: mol_type = genomic DNA

SEQ ID NO: 2105 - DNA, 1866 bp, Triticum aestivum
  source 1..1866: mol_type = genomic DNA
atgaggctctggacattctgcttcacaggatgcctgagcttggctgcacccctgacgtggtggcgtgacgtggtggcgtataacacggtcatccatggcttctttaaggaaggccaagtaggcaaggcatgcaatctgttccatggaatggcgcagcagggcgttgcgcctaatttggtgacatataactcggttattgatgcgttgtgcaaggccaaagcaatggacaaggcagagtatttccttggtcagatggttgatgatggtgtcgtacctgataatgtgacatataatagcctcatccatggatattcctcttcaggccactggaaggaggctgttagggtattcaaagagatgacaagtcggagggttaaaccaaatgtgcatactcacaacatgtttatgacctttctttgcaaacatggaagaagcaaagaagctgcaggaatttttgataccatggctatgaagggcctgaaacataacaacgtttcatatgctattctccttcacgggtatgccaccgaaggatgcttagttgatatgattaatctcttcaattcaatggaaagagactgcattctacctgactgtcgtatcttcagcatactgattaatgcatatgctaaatctgggaagcttgataaggccatgcttatcttcaataaaatgcagaaacaaggagtgagtccaaatgcagtcacatattcaactgtaatagatgcattttgcaaaaagggtcaattggacgatgctatgataaagtttaatcagatgattgatacaggagtacgacagggcacagctgtttatggttctctaatccagggtttttgtacacactgcgatttggtgaaagcaaaggaattgcttactgaaatgatgaacaaaggcatgcttcctcctgatattgcattcttcaattcaatcatgcagaacctttgcacagaaggaagggtaatagaagcacgggatgtccttggcttgatagcgcacataggtgtgaggcctgatgtttgcacatttaatatactgatcggtggatactgcctagtcggcaagatggaacatgcctcaaaaatatttgatgatatgatgtcatatggcttagaaccttctaatattacgtatggtatacttattaatggctattgcaaaaatagaaggattgatgacgggcttattctgttcaaagagatgctgcacaagggacttaaacctacaacttttaattataacgtcatactggatggattatttctggctggacgaactgttgctgcaaaggaaaagtttgatgagatggttgaatctggagtaagtgtgtgcattggtacatattcgatagttcttggtggactttgtagaaataattgctttagcgaagcaatcatgctgttccagaaattaagggcaatgaacatgaaattcaatattagaattgtcaatatcatgattgatgccttctttagggttcagagaaagcaagaagctaaagatttgtttgccgcaataccagccaatggcttggtagctaatgttgttacctacagcataacgatgacaaatcttataaaagaaggttcagtggaagaagctgacactctctttttatcaatggagaagagtggctgtactgccaacgcttggatgttaaatcatactatcagaaggttactggaaagaggagagatagtcaaggctggaaattatatgtctaaagttgatgcaaagagctactcacttgaagctaaaactgtttcattgctgatctctctcttttctgggaaagggaaatatagagaacacataggattgctccctacaaagtatcagtttcgtgaagaagcggccacagttgaa

SEQ ID NO: 2106 - DNA, 1866 bp, Triticum aestivum; identical to SEQ ID NO: 2105
  source 1..1866: mol_type = genomic DNA

SEQ ID NO: 2107 - DNA, 1866 bp, Triticum aestivum
  source 1..1866: mol_type = genomic DNA
atgaggctctggacattctgcttcacaggatgcctgagcttggctgcacccctgacgtggtggcgtgacgtggtggcatataacacggtcatccatggcttctttaaggaaggccaagtaggcaaggtatgcaatctgttccatggaatggcgcagcagggcgttgcgcctaatttggtgacatataactcggttattgatgcgttgtgcaaggccaaagcaatggacaaggcagagtatttccttggtcagatggttgatgatggtgtcgtacctgataatgtgacatataatagcctcatccatggatattcctcttcaggccactggaaggaggcagttagggtattcaaagagatgacaagtcggagggttacagcagatgtgcatactcacaacatgtttatggcctttctttgcaaacatggaagaagcaaagaagctgcaggaatttttgataccatggctatcaagggcctgaaacctgacaacgtttcatatgctattctccttcatgggtgtgccaccgaaggatgcttagttgatatgattaatctcttcaattcaatggcaacagactgtattctacctaactgccatatcttcaatatactgattaatgcatatgctaaatctgggaagcttgataaggctatgcttatcttcaatgtaatgcagaaacaaggagtgagtccagatggagtcacctattcaactgtaatacatgcattttgcaaaatgggtagcttggacattgctatggacaaatttaaccagatggttgatatgggagtacgaccgaatgcaattgtttatcattccctaatccagggtttttgtacacatggggatttagtgaaagcaaaggaattggttgctgaaatgaggaacaaagctatgcgtcctcctgatattaagttcttccattcaataatgcagaacctatgcacggaaggaagggtaatagaagcacgggatatcctcgacttgatagtgcgcattggtatgaggcctgatgttcccatctttaatttactgatcggtggatactgcctagtccgcaagatggcagatgcatcaaaaatatttgatgatatggtgtcatatggtttagaaccttcaaatattacgtatggtatacttattaatggctattgcaaaaatagaaggattgatgacgggcttattctgttcaaagagatgctgcccaagggacttaaacctacaacttttaattataacgtcatactggatggattatttctggctggacgaactgttgctgcaaaggaaaagtttgatgagatggttgaatctggagtaagtgtgtgcattggtacatattcgatagttcttggtggactttgtagaaataattgtagcggcgaagcaatcacgctattccagaaattaagcacaatggatgtgaaattcaatattataattgtcaatataatgattgatgctttctacaaggttcagcgaaaccaagaagccaaggatttgtttgctgcagtatcagccaatggtttggtagctaatgtctttacctacaccataatgatgaaaaatcttataaaagaagggtcagtggaagaagctgacgatctctttttatcaatggagaagagcggctgtactgctgactcttatatgttaaatcttatcgtcagaatgttactgggaaaaggagagatagtcaaggctgggaattatatatctaaaattgatgcaaagagctactcacttgaagctaaaactgtttcgctgcttatctctctcttttcagggaaagggaaatatagagaacacataggattgctccctgcaaagtatcggtttcgtgaagaagcagcyacagttgtg

SEQ ID NO: 2108 - DNA, 1866 bp, Triticum aestivum
  source 1..1866: mol_type = genomic DNA
atgaggctctggacattctgcttcacaggatgcctgagcttggctgcacccctgacgtggtggcgtgacgtggtggcatataacacggtcatccatggcttctttaaggaaggccaagtaggcaaggtatgcaatctgttccatggaatggcgcagcagggcgttgcgcctaatttggtgacatataactcggttattgatgcgttgtgcaaggccaaagcaatggacaaggcagagtatttccttggtcagatggttgatgatggtgtcgtacctgataatgtgacatataatagcctcatccatggatattcctcttcaggccactggaaggaggcagttagggtattcaaagagatgacaagtcggagggttacagcagatgtgcatactcacaacatgtttatggcctttctttgcaaacatggaagaagcaaagaagctgcaggaatttttgataccatggctatcaagggcctgaaacctgacaacgtttcatatgctattctccttcatgggtgtgccaccgaaggatgcttagttgatatgattaatctcttcaattcaatggcaacagactgtattctacctaactgccatatcttcaatatactgattaatgcatatgctaaatctgggaagcttgataaggctatgcttatcttcaatgtaatgcagaaacaaggagtgagtccagatggagtcacctattcaactgtaatacatgcattttgcaaaatgggtagcttggacattgctatggacaaatttaaccagatggttgatatgggagtacgaccgaatgcaattgtttatcattccctaatccagggtttttgtacacatggggatttagtgaaagcaaaggaattggttgctgaaatgaggaacaaagctatgcgtcctcctgatattaagttcttccattcaataatgcagaacctatgcacggaaggaagggtaatagaagcacgggatatcctcgacttgatagtgcgcattggtatgaggcctgatgttcccatctttaatttactgatcggtggatactgcctagtccgcaagatggcagatgcatcaaaaatatttgatgatatggtgtcatatggtttagaaccttcaaatattacgtatggtatacttattaatggctattgcaaaaatagaaggattgatgacgggcttattctgttcaaagagatgctgcccaagggacttaaacctacaacttttaattataacgtcatactggatggattatttctggctggacgaactgttgctgcaaaggaaaagtttgatgagatggttgaatctggagtaagtgtgtgcattggtacatattcgatagttcttggtggactttgtagaaataattgtagcggcgaagcaatcacgctattccagaaattaagcacaatggatgtgaaattcaatattataattgtcaatataatgattgatgctttctacaaggttcagcgaaaccaagaagccaaggatttgtttgctgcagtatcagccaatggtttggtagctaatgtctttacctacaccataatgatgaaaaatcttataaaagaagggtcagtggaagaagctgacgatctctttttatcaatggagaagagcggctgtactgctgactcttatatgttaaatcttatcgtcagaatgttactgggaaaaggagagatagtcaaggctgggaattatatatctaaaattgatgcaaagagctactcacttgaagctaaaactgtttcgctgcttatctctctcttttcagggaaagggaaatatagagaacacataggattgctccctgcaaagtatcggtttcgtgaagaagcagctacagttgtg

SEQ ID NO: 2109 - DNA, 1875 bp, Triticum aestivum
  source 1..1875: mol_type = genomic DNA
atgatctgtctccacaagcgaagcaaagctatacagtccagtccagtccagtacgcgcacagcgcccgtcccgcctccccacgccgatgtcccagcctccacctcctccgccgccgctcctcctccttcactcccacctcgccgccctcacgctcctggtctccgcacgccgcctttgccgctgccacagagagcgtccgcgccgggacgctcagcccacaagacgcacaccagctgttcgaccaattgctgcggcagtccactccggtccccgggcaagccctgaacggcttcctcgccggccttgcccgtgcgcgagacaccgacgcctgcagagacggcccctcccttgccctcacgctcttcaaccgcgtatacggagaagaagccggtccacgggtggcgccgcccacagtccacacctacaacatcctgatgaactgctgctgccgcgtgggtcgttcagacctagggcttgcctacttcagccgcctcctaaggaccggcctcaaagcgaacgaggtcaccgccagcaccgtcctcaagtgcctctgctgtgcaaaaccggcagatgaagctgtgaacgtgctgcttcataggatgtccgtcctcggctgtgtgcctaattccttctcatacaacatagttctaaagagcttatgtgacgacagcaggagcgagcaagcactcgatctgctccaggtgatggcaaaaggagatgattgccccccccccaacgttctgtcatatagcacgctcatccacggcttctttaaggaaggcgaagtaggcaaggcatgcaatctattccatgaaatgatgcggcaaggggttgtgcctgatgtggtgacgtatagctcgattatcgatgcattgtgcaaggctggagcaatggacaaagcagagttgttccttcggcagatggttgatagcggtgttccaccgaataaggtgacgtatactagcatgatccatggatattccactttggactggtggaaagaggcgactaaaatgttcagagaaatgacaagcaggggtcttataccagatattgtcagttggaactcgttcatggactccctttgcaagcatggaagaagcaaagaagctgctgaaattttcgattccatggctgccaagggccacagacctaatattgtctcctacactattcttcttcatgggtatgccaatgaaggaagctttgctgatatgatgagtctcttcaattcaatggaaggtgacggtattgtggccaactgctatgttttcaacatattaattaatgcatatgctaaacgaagaatgatggatgaagctgtgctcatacttactgaaatgcggggacaaggactgagtccagatgtattcacctattcaactctaatatctgcactttgcaaaatgggtaggctggctgatgctatggataagttcagtcagatgattggtacaggagtacaaccagacacagttgtttatcaatccctaattcagggtttctgtacacatggcgagttagtatatgaaatgatgaacaaaggtattccttgtccaaacattgcattcttcagttcaatagtagacagtctatgcaaagaaggaagggttatggatgcacaccatatctttgacttggttaaagacataggtgagagacctgacatcattatgtttaatacgctgattgacggatattgcctagtcggtgagatgggcaaagcattcatggtacttgatgtcatgacatcagctggcattgagcctgatgccattacgtatagtacacttgtcagtggatattgtaaaagtggaaggatcgatggtgggttgattctgttcagagaaatgttgcataagaaatgttacata

SEQ ID NO: 2110 - DNA, 1875 bp, Triticum aestivum; identical to SEQ ID NO: 2109
  source 1..1875: mol_type = genomic DNA

SEQ ID NO: 2111 - DNA, 1713 bp, Triticum aestivum
  source 1..1713: mol_type = genomic DNA
atgccccaactgggagttcaacctgatgtggtgacctacacctcaatcatggacgcactaagcaagtccggagcaatggacaaggcagaagtgctccttcggcaaatggttgatcaaggaattgaacccaatatcaggacatatagctgtctgatccatggatattctacttttggtcagtggaaggaggcacttagggtattcaaagaaatggcaagtcttggtgttgtaccagacgttgtcacgttgagctcattaatcgattccctttgcaggcacagaaggacaaagcaagctagagaaatttttgactctatggctgcaaagggcctgaaacctaatatcgtctcctactctactatgcttaatgggtatgtcaaagaaggatccttcgaggatatgactgatctcttcaattcgatggtacggaatggtattgtacctaaccaccatattttcaacatactgatcaatgcatatgctaaacgtggactgatggatgaggctatgcacatgttcgaagtaatgaggcaacaaggagtaaacccagatgtatttggctatcaaatcataatggattcactttgtaaaatgggtaagatggatgctgctctggacaaatttaatcagatggtcaatcaaggagtttcacctaacaaagctgtttaccaatgcctggttctgggttcttgctctcatggtgattttgtgaaagccaaggaattgatttctgaagcggttaatagaggtctgtgttctaacagtgtgttcttctatcctgtaataaacgacctttgcaaagaaggaaaggtaaaggaggcacatgatatgtttgacttcatcctaggtattggtcagcggcctgatgtgattatgtacacttcactgatggatggatattgccttgttggcaaggtggaggaagcactgagagtacttgatgctatgaagtctgctggcctccaacctgatgtttttacatatggtacacttcttaatggctactgtaaaattggaaggatcgccgatggattgagtcttttcagggaaatgtcactcagcggggttaagcccactactattatgtacaacattatacttgatgggctgtttcgctccgggagaacagattctgcaaaggaagaattcgatacaatgattgaaagtggcataccggtgggcattgacacatgcaccatagttcttagtggactttgcaaaaataattgcactgatgaagcaatagagctgttcaagaaattatgtgcaatgaatgtgaagtttgatgtcataatactcaataccatgatttcttcaatgtttaagactaggagaattgaagaagccaaggatttgtttgctactatatcaaccatagggttggtgccttctgttgtgacttacagtgtaatgatgacgaatttcataaaagaagggtcgctggcagaggctgatgatatgtttttagcaatggagaaggctagctgtgctcccaactccatcctgctaaatcaagtggtcagggcgttgctgaaaaaaggtgcagttgtgaaggctgcaacttatctcgctaaacttgatgctaaacagctgtcagttgaagcctcaacgatttcgttaatagtatttctcttctcaggggaagggaaactaagggagcacgtagagttgcttccagtaaagtaccagcctcctgagagttcggctgacagt

SEQ ID NO: 2112 - DNA, 1713 bp, Triticum aestivum; identical to SEQ ID NO: 2111
  source 1..1713: mol_type = genomic DNA

SEQ ID NO: 2113 - DNA, 1821 bp, Triticum aestivum
  source 1..1821: mol_type = genomic DNA
atggcaaaagatagaggtggctgcttccctgatgtggtggcatataacacggtcatccatggctttttcaaggagggtgaaacaggcaaggcatgcaatctatttcatgaaatgatccatcaaggggttgagcccgatgtggtgacgtacaactcggtcgttgatgcgttgtgcaaggccagggcaatggacaaagcagagctagtccttcgtcagatggttgctgatggtgctcaacccaatgcagtgacatataattgcatgattaatggatatgccacatctgggcggttgaaagaggctgctaaaatgttcagagaaatgaaaagccggggccttataccagatatttttacttgcaactccttaatgacttacctttgcaagcatggaagaagcaaagaagctgcagaatttttttattcgatgacagcaaagggccacaaaccggatatcgtctcatactgtattttgcttcatgggtatgctactgaaggatgctttcctgatatgattgatgtctttaattcaatggaaaacaatggtattgcagccgacttccatgttttcaacatattaattgatgcatatgctaaacgtggaatgatggatgaagctatgctgatatcaagtaaaatgcaggaacgcagagtgaatcctgatatagtcacctattccagcataatagctggactttccagattgggtaggctgactgaggccatggaaaaattcaatcagatgattgccttgggagtacaaccgaacaaagttgtttatcacgcgctgattcagggtttttgcatagatggtgatttggctaaagctaagcagttggtttctgaaatgatgaacagaggtattcctcgtcctaacatttcgttctttagttcactaataaagagtctctgccaagaaggaagggttatggatgcccatgatatctttgacttggttatagacatgggtgagaggcctgatgacattttatttaattcactgattgacggatactgcttagtcaggaagatggataaagcattaaaagtacttgatgtcatggaatcagttggtgttgagcctgatgttattacatacaatacacttgttaatggctattgtagaaatggaaggatcggtgatggtttgactctgttcagagagatgccgcgtaagagaattaaacctgacactaattcatattgcgtcataatggatgggttgtttcgttctgggagaactgtttctggaagggaaatgttccatgagatgatcgaaagtggaacaacagtcagcatttccacatacaacgtaatactaggaggtctttgtggaaataattgtgcagacgaagcgattgccctgttccagaaattaggttcaatgaatgtgaagttcagtattgcaatagtcaataccatgatcgatgcaatgtacagggttgggagaagagaagaagctaaggaactttttgctggaatatcagccagtgggttggtgcctaatgaatctacttatggagtaatgattatgaatcttctaaaagatggagcagtggaagatgctaacaatgtgttttcatcaatggacaagagtggtatagtccccagctctcgtctgttaaatgatattatcagaatgttgttggaaaaagatgagatcgccaaggccggaaattatttgtctaaagttgatgggaagagcatctccctagaagcttcaacaacttcattaatgttgtctctcttttcaagagaagggaaatatcgggaggacatgaaattgcttcctgcaaagtaccaatttttcgatggattttgt

SEQ ID NO: 2114 - DNA, 1821 bp, Triticum aestivum
  source 1..1821: mol_type = genomic DNA
atggcaaaagatagaggtggctgcttccctgatgtggtggcatataacacggtcatccatggctttttcaaggagggtgaaacaggcaaggcatgcaatctatttcatgaaatgatccatcaaggggttgagcccgatgtggtgacgtacaactcggtcgttgatgcgttgtgcaaggccagggcaatggacaaagcagagctagtccttcgtcagatggttgctgatggtgctcaacccaatgcagtgacatataattgcatgattaatggatatgccacatctgggcggttgaaagaggctgctaaaatgttcagagaaatgaaaagccggggccttataccagatatttttacttgcaactccttaatgacttacctttgcaagcatggaagaagcaaagaagctgcagaatttttttattcgatgacagcaaagggccacaaaccggatatcgtctcatactgtattttgcttcatgggtatgctactgaaggatgctttcctgatatgattgatgtctttaattcaatggaaaacaatggtattgcagccgacttccatgttttcaacatattaattgatgcatatgctaaacgtggaatgatggatgaagctatgctgatatcaagtaaaatgcaggaacgcagagtgaatcctgatatagtcacctattccagcataatagctggactttccagattgggtaggctgactgaggccatggaaaaattcaatcagatgattgccttgggagtacaaccgaacaaagttgtttatcacgcgctgattcagggtttttgcatagatggtgatttggctaaagctaagcagttggtttctgaaatgatgaacagaggtattcctcgtcctaacatttcgttctttagttcactaataaagagtctctgccaagaaggaagggttatggatgcccatgatatctttgacttggttatagacatgggtgagaggcctgatgacattttatttaattcactgattgacggatactgcttagtcaggaagatggataaagcattaaaagtacttgatgtcatggaatcagttggtgttgagcctgatgttattacatacaatacacttgttaatggctattgtagaaatggaaggatcggtgatggtttgactctgttcagagagatgccgcgtaagagaattaaacctgacactaattcatattgcgtcataatggatgggttgtttcgttctgggagaactgtttctggaagggaaatgttccatgagatgatcgaaagtggaacaacagtcagcatttccacatacaacgtaatactaggaggtctttgtggaaataattgtgcagacgaagcgattgccctgttccagaaattaggttcaatgaatgtgaagttcagtattgcaatagtcaataccatgatcgatgcaatgtacagggttgggagaagagaagaagctaaggaactttttgctggaatatcagccagtgggttggtgcctaatgaatctacttatggagtaatgattatgaatcttctaaaagatggagcagtggaagatgctaacaatgtgttttcatcaatggacaagagtggtatagtccccagctctcgtctgttaaatgatattatcagaatgttgttggaaaaaggtgagatcgccaaggccggaaattatttgtctaaagttgatgggaagagcatctccctagaagcttcaacaacttcattaatgttgtctctcttttcaagagaagggaaatatcgggaggacatgaaattgcttcctgcaaagtaccaatttttcgatggattttgt

SEQ ID NO: 2115 - DNA, 1821 bp, Triticum aestivum; identical to SEQ ID NO: 2114
  source 1..1821: mol_type = genomic DNA

SEQ ID NO: 2116 - DNA, 1821 bp, Triticum aestivum
  source 1..1821: mol_type = genomic DNA
atggcaaaagatagaggtggctgcttccctgatgtggtggcatataacacggtcatccatggctttttcaaggagggtgaaacaggcaaggcatgcaatctatttcatgaaatgatccatcaaggggttgagcccgatgtggtgacgtacaactcggtctttgatgcgttgtgcaaggccagggcaatggacaaagcagagctagtccttcgtcagatggttgctgatggtgctcaacccaatgcagtgacatataattgcatgattaatggatatgccacatctgggcggttgaaagaggctgctaaaatgttcagagaaatgaaaagccggggccttataccagatatttttacttgcaactccttaatgacttacctttgcaagcatggaagaagcaaagaagctgcagaatttttttattcgatgacagcaaagggccacaaaccggatatcgtctcatactgtattttgcttcatgggtatgctactgaaggatgctttcctgatatgattgatgtctttaattcaatggaaaacaatggtattgcagccgacttccatgttttcaacatattaattgatgcatatgctaaacgtggaatgatggatgaagctatgctgatatcaagtaaaatgcaggaacgcagagtgaatcctgatatagtcacctattccagcataatagctggactttccagattgggtaggctgactgaggccatggaaaaattcaatcagatgattgccttgggagtacaaccgaacaaagttgtttatcacgcgctgattcagggtttttgcatagatggtgatttggctaaagctaagcagttggtttctgaaatgatgaacagaggtattcctcgtcctaacatttcgttctttagttcactaataaagagtctctgccaagaaggaagggttatggatgcccatgatatctttgacttggttatagacatgggtgagaggcctgatgacattttatttaattcactgattgacggatactgcttagtcaggaagatggataaagcattaaaagtacttgatgtcatggaatcagttggtgttgagcctgatgttattacatacaatacacttgttaatggctattgtagaaatggaaggatcggtgatggtttgactctgttcagagagatgccgcgtaagagaattaaacctgacactaattcatattgcgtcataatggatgggttgtttcgttctgggagaactgtttctggaagggaaatgttccatgagatgatcgaaagtggaacaacagtcagcatttccacatacaacgtaatactaggaggtctttgtggaaataattgtgcagacgaagcgattgccctgttccagaaattaggttcaatgaatgtgaagttcagtattgcaatagtcaataccatgatcgatgcaatgtacagggttgggagaagagaagaagctaaggaactttttgctggaatatcagccagtgggttggtgcctaatgaatctacttatggagtaatgattatgaatcttctaaaagatggagcagtggaagatgctaacaatgtgttttcatcaatggacaagagtggtatagtccccagctctcgtctgttaaatgatattatcagaatgttgttggaaaaagatgagatcgccaaggccggaaattatttgtctaaagttgatgggaagagcatctccctagaagcttcaacaacttcattaatgttgtctctcttttcaagagaagggaaatatcgggaggacatgaaattgcttcctgcaaagtaccaatttttcgatggattttgt

SEQ ID NO: 2117 - DNA, 1821 bp, Triticum aestivum; identical to SEQ ID NO: 2116
  source 1..1821: mol_type = genomic DNA

SEQ ID NO: 2118 - DNA, 1821 bp, Triticum aestivum; identical to SEQ ID NO: 2116
  source 1..1821: mol_type = genomic DNA

SEQ ID NO: 2119 - DNA, 1701 bp, Triticum aestivum
  source 1..1701: mol_type = genomic DNA
atgatccatcaaggggttgagcctgatgtggtgacgtacaactcggtcgttgatgcattgtgcaaggccagagcaatggacaaggcagaagtagtccttcagcagatggtcgataaaggtgttcaacctaatatagtgacatatacttgcatgatcaatggatattccacaactgggcggttgaaagaggctgctaaaatgttcagagaaatgaaaagccgaggtcttataccagatattgttacttgcaactcattaatgacttccctttgcaagcatggaagaagcaaagaagctgcagaagttttttattcgatgacagcaaagggccacaaaccggatatcgtctcataccgtattttgcttcatgggtatgctactgaaggatgctttcctgatatgattgatgtctttaattcaatggaaaacaatggtattgcagccgactgccatgttttcaacatattaattgatgcatatactaaacgtggaatgatagatgaagctatgctgatatcaagtaaaatgcaggaacgcagagtgaatcccgatatagtcacctattccagcataatagctggactttccagattgggtaggctgactgaggccatggaaaaattcaatcagatgattgccttgggagtacaaccgaacaaagttgtttatcacgcgctgattcagggtttttgcatagatggtgatttggctaaagctaagcagttggtttctgaaatgatgaacaaaggtattcctcgtcctaacatttcgttctttagttcagtaataaagagtctctgccaagaaggaagggttatggatgcccatgatatctttgacttggttatagacatgggtgagaggcctgacgccattttatttaattcactgattgacggatactgcttagtcaggaagatggataaagcattaaaagtacttgatgtcatggaatcagttggtgttgagcctgatgttattacatacaatacacttgttaatggctattgtagaaatggaaggatcgatgatggtttgactctgtttagagagatgccgcgtaagagaattaaacctgacactatttcatattgcgtcataatggatgggttgtttcgttctgggagaactgtttctgcaagggaaatgttccatgagatgattgaaaatggaacgacagtcagcatttccacatacaacgtaatactaggaggtctttgtagaaataattgtgcagacgaagcgattgccctgttccagaaattaggttcaatgaatgtgaagttcagtattgcaatagtcaataccatgatcgatgcaatgtacagggttgggagaagagaagaagctaaggaactttttgctggaatatcagctcgtgggttggtgcctaatgtatctacttatggagtactgattatgaatcttctaaaagatggagcagtggaagatgctaacaatgtgttttcatcaatggacaagagtggtatagtccccagctcccgtctcatgaatgacatcatcagattgttgttggaaaaaggtgagatcgccaaggccggatattatttgtctaaagttgatgggaagagcatatcacttgaagcttcaactacttcattgatgttttctctcttctcaaggaaagggaaatatatgaaggacatgaatttgctccctgcaaagtatcaatttttcgat

SEQ ID NO: 2120 - DNA, 1335 bp, Triticum aestivum
  source 1..1335: mol_type = genomic DNA
atgatccatcaaggggttgagcctgatgtggtgacgtacaactcggtcgttgatgcattgtgcaaggccagagcaatggacaaggcagaagtagtccttcagcagatggtcgataaaggtgttcaacctaatatagtgacatatacttgcatgatcaatggatattccacatctgggcggttgaaagaggctgctaaaatgttcagagaaatgaaaagccgaggtcttataccagatattgttacttgcaactcattaatgacttccctttgcaagcatggaagaagcaaagaagctgcagaagttttttattcgatgacagcaaagggccacaaaccggatattgtctcataccgtattttgcttcatgggtatgctactgaaggatgctttcctgatatgattgatgtctttaattcaatggaaaacaatggtattgcagccgactgccatgttttcaacatattaattgatgcatatactaaacgtggaatgatagatgaagctatgctgatatcaagtaaaatgcaggaacgcagagtgaatcccgatatagtcacctattccagcataatagctggactttccagattgggtaggctgactgaggccatggaaaaattcaatcagatgattgccttgggagtacaaccgaacaaagttgtttatcacgcgctgattcagggtttttgcatagatggtgatttggctaaagctaagcagttggtttctgaaatgatgaacaaaggtattcctcgtcctaacatttcgttctttagttcagtaataaagagtctctgccaagaaggaagggttatggatgcccatgatatctttgacttggttatagacatgggtgagaggcctgacgccattttatttaattcactgattgacggatactgcttagtcaggaagatggataaagcattaaaagtacttgatgtcatggaatcagttggtgttgagcctgatgttattacatacaatacacttgttaatggctattgtagaaatggaaggatcgatgatggtttgactctgttcagagagatgccgcgtaagagaattaaacctgacactatttcatattgcgtcataatggatgggttgtttcgttctgggagaactgtttctgcaagggaaatgttccatgagatgattgaaaatggaacaacagtcagcatttccacatacaacgtaatactaggaggtctttgtagaaataattgtgcagacgaagcgattgccctgttccagaaattaggttcaatgaatgtgaagttcagtattgcaatagtcaataccatgatcgatgcaatgtacagggttggg

SEQ ID NO: 2121 - DNA, 1701 bp, Triticum aestivum
  source 1..1701: mol_type = genomic DNA
atgatccatcaaggggttgagcctgatgtggtgacgtacaactcggtcgttgatgcattgtgcaaggccagagcaatggacaaggcagaagtagtccttcagcagatggtcgataaaggtgttcaacctaatatagtgacatatacttgcatgatcaatggatattccacatctgggcggttgaaagaggctgctaaaatgttcagagaaatgaaaagccgaggtcttataccagatattgttacttgcaactcattaatgacttccctttgcaagcatggaagaagcaaagaagctgcagaagttttttattcgatgacagcaaagggccacaaaccggatattgtctcataccgtattttgcttcatgggtatgctactgaaggatgctttcctgatatgattgatgtctttaattcaatggaaaacaatggtattgcagccgactgccatgttttcaacatattaattgatgcatatactaaacgtggaatgatagatgaagctatgctgatatcaagtaaaatgcaggaacgcagagtgaatcccgatatagtcacctattccagcataatagctggactttccagattgggtaggctgactgaggccatggaaaaattcaatcagatgattgccttgggagtacaaccgaacaaagttgtttatcacgcgctgattcagggtttttgcatagatggtgatttggctaaagctaagcagttggtttctgaaatgatgaacaaaggtattcctcgtcctaacatttcgttctttagttcagtaataaagagtctctgccaagaaggaagggttatggatgcccatgatatctttgacttggttatagacatgggtgagaggcctgacgccattttatttaattcactgattgacggatactgcttagtcaggaagatggataaagcattaaaagtacttgatgtcatggaatcagttggtgttgagcctgatgttattacatacaatacacttgttaatggctattgtagaaatggaaggatcgatgatggtttgactctgttcagagagatgccgcgtaagagaattaaacctgacactatttcatattgcgtcataatggatgggttgtttcgttctgggagaactgtttctgcaagggaaatgttccatgagatgattgaaaatggaacaacagtcagcatttccacatacaacgtaatactaggaggtctttgtagaaataattgtgcagacgaagcgattgccctgttccagaaattaggttcaatgaatgtgaagttcagtattgcaatagtcaataccatgatcgatgcaatgtacagggttgggagaagagaagaagctaaggaactttttgctggaatatcagctcgtgggttggtgcctaatgtatctacttatggagtaatgattatgaatcttctaaaagatggagcagtggaagatgctaacaatgtattttcatcaatggacaagagtggtatagtccccagctcccgtctcatgaatgacatcatcagattgttgttggaaaaaggtgagatcgccaaggccggatattatttgtctaaagttgatgggaagagcatatcacttgaagcttcaactacttcatcgatgttttctctcttctcaaggaaagggaaatatatgaaggacatgaatttgctccctgcaaagtatcaatttttcgat

SEQ ID NO: 2122 - DNA, 1701 bp, Triticum aestivum; identical to SEQ ID NO: 2121
  source 1..1701: mol_type = genomic DNA

SEQ ID NO: 2123 - DNA, 1701 bp, Triticum aestivum
  source 1..1701: mol_type = genomic DNA
atgatccatcaaggggttgagcctgatgtggtgacgtacaactcggtcgttgatgcattgtgcaaggccagagcaatggacaaggcagaagtagtccttcagcagatggtcaataaaggtgttcaacctaatatagtgacatatacttgcatgatcaatggatattccacatctgggcggttgaaagaggctgctaaaatgttcagagaaatgaaaagccgaggtcttataccagatattgttacttgcaactcattaatgacttccctttgcaagcatggaagaagcaaagaagctgcagaagttttttattcgatgacagcaaagggccacaaaccggatattgtctcataccgtattttgcttcatgggtatgctactgaaggatgctttcctgatatgattgatgtctttaattcaatggaaaacaatggtattgcagccgactgccatgttttcaacatattaattgatgcatatactaaacgtggaatgatagatgaagctatgctgatatcaagtaaaatgcaggaacgcagagtgaatcccgatatagtcacctattccagcataatagctggactttccagattgggtaggctgactgaggccatggaaaaattcaatcagatgattgccttgggagtacaaccgaacaaagttgtttatcacgcgctgattcagggtttttgcatagatggtgatttggctaaagctaagcagttggtttctgaaatgatgaacaaaggtattcctcgtcctaacatttcgttctttagttcagtaataaagagtctctgccaagaaggaagggttatggatgcccatgatatctttgacttggttatagacatgggtgagaggcctgacgccattttatttaattcactgattgacggatactgcttagtcaggaagatggataaagcattaaaagtacttgatgtcatggaatcagttggtgttgagcctgatgttattacatacaatacacttgttaatggctattgtagaaatggaaggatcgatgatggtttgactctgttcagagagatgccgcgtaagagaattaaacctgacactatttcatattgcgtcataatggatgggttgtttcgttctgggagaactgtttctgcaagggaaatgttccatgagatgattgaaaatggaacaacagtcagcatttccacatacaacgtaatactaggaggtctttgtagaaataattgtgcagacaaagcgattgccctgttccagaaattaggttcaatgaatgtgaagttcagtattgcaatagtcaataccatgatcgatgcaatgtacagggttgggagaagagaagaagctaaggaactttttgctggaatatcagctcgtgggttggtgcctaatgtatctacttatggagtaatgattatgaatcttctaaaagatggagcagtggaagatgctaacaatgtattttcatcaatggacaagagtggtatagtccccagctcccgtctcatgaatgacatcatcagattgttgttggaaaaaggtgagatcgccaaggccggatattatttgtctaaagttgatgggaagagcatatcacttgaagcttcaactacttcatcgatgttttctctcttctcaaggaaagggaaatatatgaaggacatgaatttgctccctgcaaagtatcaatttttcgat

SEQ ID NO: 2124 - DNA, 1701 bp, Triticum aestivum; identical to SEQ ID NO: 2121
  source 1..1701: mol_type = genomic DNA

SEQ ID NO: 2125 - DNA, 1155 bp, Triticum aestivum
  source 1..1155: mol_type = genomic DNA
atgatgcagcaaggggttgtgcctgatgtggtgacgtataactcgattattgatgcgctgtgcaaggccagagctatgggcaaggcagagttgttcctagggcagatggttgataacagtgttcgaccagataacgtgacgtatactgcagtgatccatggatattccactttgggccagtggaaaaaggcgactaaaatgtttagagaaatgacaaggcgcggtcttgaaccaaatactgtcacttggaactcattcatggcctccctctgcaagcatggaagaagcaaagaagctgcagaaatttttcattccatggctgcgaagggccacaagcctgatgtcgtctcgtattgtgttctgctccaagggtatgctacagaagggtgctttgcagatatggttgatctctataattcaatggcaagaaatggtattgtacccaatcgccaggttttcaacatattaattgatgcatatgctaagcgtggaatgacggatgaagctacgcttatatttactgaaatgcggggacaaggactgagtccagatgtatgcacctattcaactcttatatctgcacttagcagaacgggtaggctggcggatgccatggatagattcagtcagatgatttctattggcatacaaccagacgcagttgtttatcaagctctaattcagggttattgtacagttggtgatttggtgaaagcaaagggattggtttctgaaatgatgaacagaggtattccccctaccgacattgtgttctttaattcaataatgagtagtctatgcaaagaaggaagggttacaaatgcacacagtatccttgacttcgttatacactttggtgagaggcctagcatcattacatttaatttgctgattgacgggtattgcttagttggcaagatgaagaaagctttcagagtacttgataccatggcatcagttggcattgggcctgatgatatttcatatagtgcaatcattaatggctgttttaaaaatggaaggatcgatgatggattgaccatattccgagaaatgctgaagaaagttacacctacaactgttacatataacatcatactgggcgggttattttgtgctgggcaaacagttgctgcacagaaaatgttcatgaga

SEQ ID NO: 2126 - DNA, 1155 bp, Triticum aestivum; identical to SEQ ID NO: 2125
  source 1..1155: mol_type = genomic DNA

SEQ ID NO: 2127 - DNA, 1707 bp, Triticum aestivum
  source 1..1707: mol_type = genomic DNA
atgatgcagcaaggggttgtgcctgatgtggtgacgtataactcgattattgatgcgctgtgcaaggccagagctatgggcaaggcagagttgttcctagggcagatggttgataacagtgttcgaccagataacgtgacgtatactgcagtgatccatggatattccactttgggccagtggaaaaaggcgactaaaatgtttagagaaatgacaagccgcggtcttgaaccaaatactgtcacttggaactcattcatggactccctctgcaagcatggaagaagcaaagaagctgcagaaatttttcattccatggctgcgaagggccacaagcctgatgtcgtctcgtatcgtgttctgctccaagggtatgctacagaagggtgctttgcagatatggttgatctctataattcaatggcaagaaatggtattgtacccaatcgccaggttttcaacatattaattgatgcatatgctaagcgtggaatgacggatgaagctacgcttatatttactgaaatgcggggacaaggactgagtccagatgtatgcacctattcaactcttatatctgcacttagcagaacgggtaggctggcggatgccatggatagattcagtcagatgatttctattggcatacaaccagacgcagttgtttatcaagctctaattcagggttattgtacagttggtgatttggtgaaagcaaagggattggtttctgaaatgatgaacagaggtattccccctaccgacattgtgttctttaattcaataatgagtagtctatgcaaagaaggaagggttacaaatgcacacagtatccttgacttcgttatacactttggtgagaggcctagcatcattacatttaattttctgattgacgggtattgcttagttggcaagatgaagaaagctttcggagtacttgataccatggcatcagttggcattgggcttgatgatatttcatatagtgcaatcattaatggctgttttaaaaatggaaggatcgatgatggattgaccatattccgagaaatgctgaagaaagttacacctacaactgttacatataacatcatactgggcgggttattttgtgctgggcaaacagttgctgcacagaaaatgttccatgagatgatcgaaagtggaataacagtgagcagttccacatacaggacaatccttggaggactttgcaggaatagttgtgaggacgaagcgatcaccctgttccagaaattaggagcaatgaatgtgaagttggatattgcaatactcaataccatgatcaatgcaatgttcaaggttcagagaagagaagaagctatcgatttgtttgctgcagtatcatccagtggattggtacctaatgcttctacctacggtgtaatgataaaaaatcttctaagagaaggatcagtggaaaaagctgaaaatatgttctcattaatggagaagagcggttgtgctccggactctcgtcttataaatgatatcatcagaatattattacagaaaggtgagattgtcaaggctggaaattatatgtctaaagttgatggcaggaggatctcacttgaagctagaactacttcattgctgatacgtctcttttcaagtgaagggaaatatcggggacaaataaatttgctccctgtaaagtaccaaaattttgatggatttagt

SEQ ID NO: 2128 - DNA, 1707 bp, Triticum aestivum; identical to SEQ ID NO: 2127
  source 1..1707: mol_type = genomic DNA

SEQ ID NO: 2129 - DNA, 1707 bp, Triticum aestivum; identical to SEQ ID NO: 2127
  source 1..1707: mol_type = genomic DNA

SEQ ID NO: 2130 - DNA, 1707 bp, Triticum aestivum
  source 1..1707: mol_type = genomic DNA
atgatgcagcaaggggttgtgcctgatgtggtgacgtataactcgattattgatgcgctgtgcaaggtcagagctatgggcaaggcagagttgttcctagggcagatggttgataacagtgttcgaccagataacgtgacgtatactgcagtgatccatggatattccactttgggccagtggaaaaaggcgactaaaatgtttagagaaatgacaagccgcggtcttgaaccaaatactgtcacttggaactcattcatggactccctctgcaagcatggaagaagcaaagaagctgcagaaatttttcattccatggctgcgaagggccacaagcctgatgtcgtctcgtatcgtgttctgctccaagggtatgctacagaagggtgctttgcagatatggttgatctctataattcaatggcaagaaatggtattgtacccaatcgccaggttttcaacatattaattgatgcatatgctaagcgtggaatgacggatgaagctacgcttatatttactgaaatgcggggacaaggactgagtccagatgtatgcacctattcaactcttatatctgcacttagcagaacgggtaggctggcggatgccatggatagattcagtcagatgatttctattggcatacaaccagacgcagttgtttatcaagctctaattcagggttattgtacagttggtgatttggtgaaagcaaagggattggtttctgaaatgatgaacagaggtattccccctaccgacattgtgttctttaattcaataatgagtagtctatgcaaagaaggaagggttacaaatgcacacagtatccttgacttcgttatacactttggtgagaggcctagcatcattacatttaattttctgattgacgggtattgcttagttggcaagatgaagaaagctttcggagtacttgataccatggcatcagttggcattgggcttgatgatatttcatatagtgcaatcattaatggctgttttaaaaatggaaggatcgatgatggattgaccatattccgagaaatgctgaagaaagttacacctacaactgttacatataacatcatactgggcgggttattttgtgctgggcaaacagttgctgcacagaaaatgttccatgagatgatcgaaagtggaataacagtgagcagttccacatacaggacaatccttggaggactttgcaggaatagttgtgaggacgaagcgatcaccctgttccagaaattaggagcaatgaatgtgaagttggatattgcaatactcaataccatgatcaatgcaatgttcaaggttcagagaagagaagaagctatcgatttgtttgctgcagtatcatccagtggattggtacctaatgcttctacctacggtgtaatgataaaaaatcttctaagagaaggatcagtggaaaaagctgaaaatatgttctcattaatggagaagagcggttgtgctccggactctcgtcttataaatgatatcatcagaatattattacagaaaggtgagattgtcaaggctggaaattatatgtctaaagttgatggcaggaggatctcacttgaagctagaactacttcattgctgatacgtctcttttcaagtgaagggaaatatcggggacaaataaatttgctccctgtaaagtaccaaaattttgatggatttagt

SEQ ID NO: 2131 - DNA, 1824 bp, Triticum aestivum
  source 1..1824: mol_type = genomic DNA
atgatggcgaaagaaggaggtggttgcttccccaacgtggtggcttataacacggtcatccatggcttccttaaggagggcaaaacaggcaaggcatgcaatctcttccatgaaatgatgcagctagggcttgtgcccgatgtggtgacatacaactcgatcgttgatgcgttgtgcaaggccagagcaatggacaaggcagaagtagtccttcatcagatgatcggtaaaggtgctcaacctgatacagtgacatataattgcatgatccatggatattccacatctgggcggttgaaagaggctgttaaaatgttcagagaaatgaaaagccggggtcttgcaccaaatattgttacttgcggctcgttaatgacttccctttgcaagcatggaagaagcaaagaagctagagaaatatttgattccatgactgccaaaggccacagagctaatgtcgtctcatactctattttgcttcatgggtatgccaatgaaggatgctttgctgatatgattgatctctttaattcaatgaaaagcaacggtattgcagctgactgccgtgtttttaccatattaattgatgcctatgctaaacgtggaatgatggatgatgcaatgcacatatttacggaaatgtgggaaaaaggagtgagtcccgatgtggttacctattccactgtaatagctgcactttccaggatgggtagattgaccgatgctatggacaaatttaatcagatgatttccatgggggttcaaccgaacacagttgtttatcacaccctaattcagggctcttgtatgcatggtgatttgattaaagccaaggagctggtttctgaaatgatgaacaaaggtattcctcgtcctagcattgcgttcttcggttcaataataaacaggttatgcaaagatggaagggttatggatgcacatgatatctttgacttggttatagacataggcgagaggcctagtgtcattacatttaattcactggttgacggatattgcttagtcggcaagatggataaagcatttggaatgcttaatgccatggaatcagttggtgttgagcctgatattgttacttacagtacacttcttgatggctattttaaaaatggaaggatcaatgatggtttgactctgtttagagaaatgccgcttaagagaattaaacctgacactgttacatatggcatcatgttggatgggtgttttcgtgctgggagaactgttgctgcaaggacaatgttccatgagatgatcgaaagtggaataacagtggacatccccacatataatatagttcttaggggactttgtagaaataactgcacagatgaagcaatcgccctgttccagaaattaggtgcaatgagtatgaagttcaatattgcaatactcaataccatgatcaatgcaatctacaaggttcggagaagagaagaagctaacaatttgtttgctgcaatatcagccagtgggttggtgcccaatcaatctacttatgctgtaatgataataaatcttctaaaagatggagcagtggaacatgctagcaatatgttttcatcaatggagaaaagtggtattgtccccagctcccgtcttataaatggtatcatcagattgttgttggagaatggtgagattgccaaggctggaatttatttgtctaaagttgatgggaatagcatctcacttgaagcttcaactacttcattgatgttgtctctgttttcaaggaaagggaaatatcaggaggacatgaagttgctccctgcaaagtatcaattttttggtgaatttggc

SEQ ID NO: 2132 - DNA, 1044 bp, Triticum aestivum
  source 1..1044: mol_type = genomic DNA
atgatggcgaaagaaggaggtggttgcttccccaacgtggtggcttataacacggtcatccatggcttccttaaggagggcaaaacaggcaaggcatgcaatctcttccatgaaatgatgcagctagggcttgtgcccgatgtggtgacatacaactcgatcgttgatgcgttgtgcaaggccagagcaatggacaaggcagaagtagtccttcatcagatgatcggtaaaggtgctcaacctgatacagtgacatataattgcatgatccatggatattccacatctgggcggttgaaagaggctgttaaaatgttcagagaaatgaaaagccggggtcttgcaccaaatattgttacttgcggctcgttaatgacttccctttgcaagcatggaagaagcaaagaagctagagaaatatttgattccatgactgccaaaggccacagagctaatgtcgtctcatactctattttgcttcatgggtatgccaatgaaggatgctttgctgatatgattgatctctttaattcaatgaaaagcaacggtattgcagctgactgccgtgtttttaccatattaattgatgcctatgctaaacgtggaatgatggatgatgcaatgcacatatttacggaaatgtgggaaaaaggagtgagtcccgatgtggttacctattccactgtaatagctgcactttccaggatgggtagattgaccgatgctatggacaaatttaatcagatgatttccatgggggttcaaccgaacacagttgtttatcacaccctaattcagggctcttgtatgcatggtgatttgattaaagccaaggagctggtttctgaaatgatgaacaaaggtattcctcgtcctagcattgcgttcttcggttcaataataaacaggttatgcaaagatggaagggttatggatgcacatgatatctttgacttggttatagacataggcgagaggcctagtgtcattacatttaaatgtaatgacactaggcctctttgcacatactgtttattactgaat

SEQ ID NO: 2133 - DNA, 1824 bp, Triticum aestivum; identical to SEQ ID NO: 2131
  source 1..1824: mol_type = genomic DNA

SEQ ID NO: 2134 - DNA, 1824 bp, Triticum aestivum; identical to SEQ ID NO: 2131
  source 1..1824: mol_type = genomic DNA

SEQ ID NO: 2135 - DNA, 795 bp, Triticum aestivum
  source 1..795: mol_type = genomic DNA
atgtcatggaatcagttggtgttgagcctgatgttattacatataatacacttgttaatggctattgtaaaagtggaaggatcgatgatggtctcgttctattcagagaaatgccgagtaagagagttaaacctgactgttacatatggcatcatactggcagggttgtttcgtgcttggagaactattgctgcaaggacaatgttccatgagatgatcgaaagtggaataacagtggacatcgtcacatacaatataattcttacaggactctgtagaaataattgcatagatgaagcgatcgccctgttccagaaattaggtgtaatgagtgtgaagttcaatattgcaataataaataccatgatcgatgcaatgtacaaggttcggagaagagaagaagccagtgatttatttgctgcaatatcagccagtggattggtgcccaatgaatctacttatgcagtaatgataataaatcttctaaaagatggagcagtggaagaagcagacaatatgttttcatcaatggagaaaagtggtatagtccccagctcccgtctgttaaatcgtatcatcagaatgttgttggaaaaaggtgagactgccaaggccggaaattatttgtctaaagttgatgggaagggcatctcacttgaagcttcaacgacttcattaatgttgtctctcttttcaagagaagggaaatatcgggaggacgtgaaattgcttcctgcaaagtaccaattttttgatggatttgttgattttgcacaagactctgctcaggaagct

SEQ ID NO: 2136 - DNA, 1818 bp, Triticum aestivum
  source 1..1818: mol_type = genomic DNA
atgtgggcatataacacggtaatccatggcttctttaaggaaggcgaaacaggcaaggcgtgcaatctattccatgaaatggtacggcaagggattgtgcctgatgtggtgacatataactcgattattgacgcgttgtgcaaggccagggcaatggacaaggcagagttagtccttcagcagatggttgctgatggtgctcaacccaatgaagtgacatataattccatgatcaatggatatgcctcatctgggcgcttaaaagggactactaaaatgttcagagaaatgaaaaggcggggtcttataccagataattttacttgcaactcgttcctggcctccctgtgcaagcatggaagaagcaaagaagctgcagaattttttgattccatgacagccaagggccacaaacctgatatcgtctcgtactgtactttgcttcatgggtatgccagtgaaggatgctttgctgatatgattgatctttttaattcaatggaaagcaatgttattgcggccgactgccgtgttttcaccattttaattgttgcctatgctaaacgtggaatgatggatgaagctatgctggtatcaagtaaaatgcaggaacgcggagtgaatccgaatatattcacctattccagcataatagctggcctttccagaatgggtaggctgaccgaggccatggaaaaattcaatcagatgattgctttgggagtacaaccggacaaagttgtttatctgtctctgattcagggtttttgcttagatggtgatttggctaaagttaagcagttggtttctgaaatgatgaacagaggtattcctcattctggcattccgttcttcggttcagtaataaagaatctgtgccaagaaggaagggttatggatgcacatgaaatctttgacttggttatagacatgggtgagaggcctgatgacattttatttaattcactgattgatggatactgcttagtcgggaagatggataaagcattaaaagtacttgatgtcatggaatcagttggtgttgagcctgatgttattacatataatacacttgttaatggctattgtaaaagtggaaggatcgatgatggtctcgttctattcagagaaatgccgagtaagagagttaaacctgacactgttacatatggcatcatactggcagggttgtttcgtgcttggagaactattgctgcaaggacaatgttccatgagatgatcgaaagtggaataacagtggacatcgtcacatacaatataattcttacaggactctgtagaaataattgcatagatgaagcgatcgccctgttccagaaattaggtgtaatgagtgtgaagttcaatattgcaataataaataccatgatcgatgcaatgtacaaggttcggagaagagaagaagccggtgatttatttgctgcaatatcagccagtggattggtgcccaatgaatctacttatgcagtaatgataataaatcttctaaaagatggagcagtggaagaagcagacaatatgttttcatcaatggagaaaagtggtatagtccccagctcccgtctgttaaatcgtatcatcagaatgttgttggaaaaaggtgagactgccaaggccggaaattatttgtctaaagttgatgggaagggcatctcacttgaagcttcaacgacttcattaatgttgtctctcttttcaagagaagggaaatatcgggaggacgtgaaattgcttcctgcaaagtaccaatttttttatggatttgttgattttgcacaagactctgctcaggaagct

SEQ ID NO: 2137 - DNA, 1230 bp, Triticum aestivum
  source 1..1230: mol_type = genomic DNA
atgtgggcatataacacggtaatccatggcttctttaaggaaggagaaacaggcaaggcgtgcaatctattccatgaaatggtacggcaagggattgtgcctgatgtggtgacatataactcgattattgacgcgttgtgcaaggccagggcaatggacaaggcagagttagtccttcagcagatggttgctgatggtgctcaacccaatgaagtgacatataattccatgatcaatggatatgcctcatctgggcgcttaaaagggactactaaaatgttcagagaaatgaaaaggcggggtcttataccagataattttacttgcaactcgttcctggcctccctgtgcaagcatggaagaagcaaagaagctgcagaattttttgattccatgacagccaagggccacaaacctgatatcgtctcgtactgtactttgcttcatgggtatgccagtgaaggatgctttgctgatatgattgatctttttaattcaatggaaagcaatggtattgcggccgactgccgtgttttcaccattttaattgttgcctatgctaaacgtggaatgatggatgaagctatgctggtatcaagtaaaatgcaggaacgcggagtgaatccgaatatattcacctattccagcataatagctggcctttccagaatgggtaggctgaccgaggccatggaaaaattcaatcagatgattgctttgggagtacaaccggacaaagttgtttatctgtctctgattcagggtttttgcttagatggtgatttggctaaagttaagcagttggtttctgaaatgatgaacagaggtattcctcattctgacattccgttcttcggttcagtaataaagaatctgtgccaagaaggaagggttatggatgcacatgaaatctttgacttggttatagacatgggtgagaggcctgatgacattttatttaattcactgattgatggatactgcttagtcgggaagatggataaagcattaaaagtacttgatgtcatggaatcagttggtgttgagcctgatgttattacatataatacacttgttaatggctattgtaaaagtggaaggatcgatgatggtctcgttctattcagagaaatgccgagtaagagagttaaacctgactgttacatatggcatcatactggcagggttgtttcgtgcttggagaactattgctgcaaggacaatgttcca

SEQ ID NO: 2138 - DNA, 1818 bp, Triticum aestivum
  source 1..1818: mol_type = genomic DNA
atgtgggcatataacacggtaatccatggcttctttaaggaaggcgaaacaggcaaggcgtgcaatctattccatgaaatggtacggcaagggattgtgcctgatgtggtgacatataactcgattattgacgcgttgtgcaaggccagggcaatggacaaggcagagttagtccttcagcagatggttgctgatggtgctcaacccaatgaagtgacatataattccatgatcaatggatatgcctcatctgggcgcttaaaagggactactaaaatgttcagagaaatgaaaaggcggggtcttataccagataattttacttgcaactcgttcctggcctccctgtgcaagcatggaagaagcaaagaagctgcagaattttttgattccatgacagccaagggccacaaacctgatatcgtctcgtactgtactttgcttcatgggtatgccagtgaaggatgctttgctgatatgattgatctttttaattcaatggaaagcaatggtattgcggccgactgccgtgttttcaccattttaattgttgcctatgctaaacgtggaatgatggatgaagctatgctggtatcaagtaaaatgcaggaacgcggagtgaatccgaatatattcacctattccagcataatagctggcctttccagaatgggtaggctgaccgaggccatggaaaaattcaatcagatgattgctttgggagtacaaccggacaaagttgtttatctgtctctgattcagggtttttgcttagatggtgatttggctaaagttaagcagttggtttctgaaatgatgaacagaggtattcctcattctgacattccgttcttcggttcagtaataaagaatctgtgccaagaaggaagggttatggatgcacatgaaatctttgacttggttatagacatgggtgagaggcctgatgacattttatttaattcactgattgatggatactgcttagtcgggaagatggataaagcattaaaagtacttgatgtcatggaatcagttggtgttgagcctgatgttattacatataatacacttgttaatggctattgtaaaagtggaaggatcgatgatggtctcgttctattcagagaaatgccgagtaagagagttaaacctgacactgttacatatggcatcatactggcagggttgtttcgtgcttggagaactattgctgcaaggacaatgttccatgagatgatcgaaagtggaataacagtggacatcgtcacatacaatataattcttacaggactctgtagaaataattgcatagatgaagcgatcgccctgttccagaaattaggtgtaatgagtgggaagttcaatattgcaataataaataccatgatcgatgcaatgtacaaggttcggagaagagaagaagccagtgatttatttgctgcaatatcagccagtggattggtgcccaatgaatctacttatgcagtaatgataataaatcttctaaaagatggagcagtggaagaagcagacaatatgttttcatcaatggagaaaagtggtatagtccccagctcccgtctgttaaatcgtatcatcagaatgttgttggaaaaaggtgagactgccaaggccggaaattatttgtctaaagttgatgggaagggcatctcacttgaagcttcaacgacttcattaatgttgtctctcttttcaagagaagggaaatatcgggaggacgtgaaattgcttcctgcaaagtaccaattttttgatggatttgttgattttgcacaagactctgctcaggaagct

SEQ ID NO: 2139 - DNA, 1818 bp, Triticum aestivum; identical to SEQ ID NO: 2136
  source 1..1818: mol_type = genomic DNA

SEQ ID NO: 2140 - DNA, 1818 bp, Triticum aestivum; identical to SEQ ID NO: 2136
  source 1..1818: mol_type = genomic DNA

SEQ ID NO: 2141 - DNA, 1818 bp, Triticum aestivum
  source 1..1818: mol_type = genomic DNA
atgtgggcatataacacggtaatccatggcttctttaaggaaggcgaaacaggcaaggcgtgcaatctattccatgaaatggtacggcaagggattgtgcctgatgtggtgacatataactcgattattgacgcgttgtgcaaggccagggcaatggacaaggcagagttagtccttcagcagatggttgctgatggtgctcaacccaatgaagtgacatataattccatgatcaatggatatgcctcatctgggcgcttaaaagggactactaaaatgttcagagaaatgaaaaggcggggtcttataccagataattttacttgcaactcgttcctggcctccctgtgcaagcatggaagaagcaaagaagctgcagaattttttgattccatgacagccaagggccacaaacctgatatcgtctcgtactgtactttgcttcatgggtatgccagtgaaggatgctttgctgatatgattgatctttttaattcaatggaaagcaatggtattgcggccgactgccgtgttttcaccattttaattgttgcctatgctaaacgtggaatgatggatgaagctatgctggtatcaagtaaaatgcaggaacgcggagtgaatccgaatatattcacctattccagcataatagctggcctttccagaatgggtaggctgaccgaggccatggaaaaattcaatcagatgattgctttgggagtacaaccggacaaagttgtttatctgtctctggttcagggtttttgcttagatggtgatttggctaaagttaagcagttggtttctgaaatgatgaacagaggtattcctcattctgacattccgttcttcggttcagtaataaagaatctgtgccaagaaggaagggttatggatgcacatgaaatctttgacttggttatagacatgggtgagaggcctgatgacattttatttaattcactgattgatggatactgcttagtcgggaagatggataaagcattaaaagtacttgatgtcatggaatcagttggtgttgagcctgatgttattacatataatacacttgttaatggctattgtaaaagtggaaggatcgatgatggtctcgttctattcagagaaatgccgagtaagagagttaaacctgacactgttacatatggcatcatactggcagggttgtttcgtgcttggagaactattgctgcaaggacaatgttccatgagatgatcgaaagtggaataacagtggacatcgtcacatacaatataattcttacaggactctgtagaaataattgcatagatgaagcgatcgccctgttccagaaattaggtgtaatgagtgggaagttcaatattgcaataataaataccatgatcgatgcaatgtacaaggttcggagaagagaagaagccagtgatttatttgctgcaatatcagccagtggattggtgcccaatgaatctacttatgcagtaatgataataaatcttctaaaagatggagcagtggaagaagcagacaatatgttttcatcaatggagaaaagtggtatagtccccaggtcccgtctgttaaatcgtatcatcagaatgttgttggaaaaaggtgagactgccaaggccggaaattatttgtctaaagttgatgggaagggcatctcacttgaagcttcaacgacttcattaatgttgtctctcttttcaagagaagggaaatatcgggaggacgtgaaattgcttcctgcaaagtaccaattttttgatggatttgttgattttgcacaagactctgctcaggaagct

SEQ ID NO: 2142 - DNA, 1605 bp, Triticum aestivum
  source 1..1605: mol_type = genomic DNA
atgccccgtctccgcctccgtcgcttctccaccgcgccgatgttccacctcctccgccgcagctcctcctccaccaccacctcgccgccctcgcgttcctggtctccccacgccgcctttgccgccgccacggagcgcatccgcgccgggacgctcagccgggaagacgcgcaccacctgttcgacgaattgctacggcaggccacccccgtccccagccgctccctaaacggcttacttgccgctctcgcccgtgtgcccgcccccgccgcctgcatcagagatggtcccgctctcgcccttggcctcttcaaccgcgtctgccgggatgaagccggcgcgcgggtggcaccacccacagtcttcacttacggtatcctcatgcactgctgctgctgcgcacatcgcccggacctagggcttgccttattcggccgcttcctcaggacgggcctgaagacaaatgagatcattgccaccaccttcctcaagtgcctctgctacgcaaaacggacggatgaggctctgaacgtgctgcttcataggatgtccgagctcggctgtgtgcctgatgccatctcatacaacattgttctgaagagcttatgtgaagatagcatgagtcagcgggcgctcgacctcctccagatgatggcgaaagaaggaggtggctgctcccccaacgtggtggcgtatagcacagtcatccatggcttttttaaggaaggtgaaacaggcaaggcatgcaatctgttccatgaaatgatgcagcaagatgttgagcccaatgtgtggacatatagttcaatcattgatgcattgtgcaatgccagagcaatggacaaggcagagctagtgcttcagcagatggttaacaaaggtgttcaacccaataatgtgacatataattgcatgatccatggatattccacatctgggaggtggaaagaggctgctaaattgtttagagaaatgaaaagccggggccttataccagatacttctacttgcaacgccttaatgacttaccattgtaagcatggaagaagcaaagaagctgcagaattttttgatgccatgactgccaaaggccacagagatgtcatctcctactgtattttgcttcatgggtatgccaatgaaggatgctttgctgatatgattgatctctttaattcaatggaaagcaatggttttgtagccgactgccatgttttcaccatattaattgatgcatatgctaaacgtggaatgatggatgaagctatgctcatatttactgaaatgcgggaaaaaggagtgagtcccaatgtagtcacctattccactgtaatagccgcactttgcagattgggtaggctgtccgatgctatggacaggttcaatgagatgactgatatgggtgtacagccgaacacagctgtttatcactccctaattcagggtttttgtatgcatggtgatttggttaaagttaaggaatttgtttctgaaatgatgaacaaaggtattcctcgtcctgacattgcgttcttcacttcagtaattaactctttatgcaaagaaggaagggttatgaatgcacaagtatctttgacttggtta

SEQ ID NO: 2143 - DNA, 1605 bp, Triticum aestivum; identical to SEQ ID NO: 2142
  source 1..1605: mol_type = genomic DNA

SEQ ID NO: 2144 - DNA, 1605 bp, Triticum aestivum; identical to SEQ ID NO: 2142
  source 1..1605: mol_type = genomic DNA

SEQ ID NO: 2145 - DNA, 1557 bp, Triticum aestivum
  source 1..1557: mol_type = genomic DNA
atggcgactgcgtcgtttgaggagagaaccacctcgccgccctcgcgttcctggtctccccacgccgccattgccgccgccacggagcgcatccgcgccgggacgctcagccgggaagacgcgcaccacctgttcgacgaattgctacggcaggccacccccgtccccagccgctccctaaacggcttacttgccgctctcgcccgtgtgcccgcccccgccgcctgcatcagagatggtcccgctctcgcccttggcctcttcaaccgcgtctgccgggatgaagccggcgcgcgggtggcaccacccacagtcttcacttacggtatcctcatgcactgctgctgctgcgcacatcgcccggacctagggcttgccttattcggccgcttcctcaggacgggcctgaagacaaatgagatcattgccaccaccttcctcaagtgcctctgctacgcaaaacggacggatgaggctctgaacgtgctgcttcataggatgtccgagctcggctgtgtgcctgatgccatctcatacaacattgttctgaagagcttatgtgaagatagcatgagtcagcgggcgctcgacctcctccagatgatggcgaaagaaggaggtggctgctcccccaacgtggtggcgtatagcacagtcatccatggcttttttaaggaaggtgaaacaggcaaggcatgcaatctgttccatgaaatgatgcagcaagatgttgagcccaatgtgtggacatatagttcaatcattgatgcattgtgcaatgccagagcaatggacaaggcagagctagtgcttcagcagatggttaacaaaggtgttcaacccaataatgtgacatataattgcatgatccatggatattccacatctgggaggtggaaagaggctgctaaattgtttagagaaatgaaaagccggggccttataccagatacttctacttgcaacgccttaatgacttaccattgtaagcatggaagaagcaaagaagctgcagaattttttgatgccatgactgccaaaggccacagagatgtcatctcctactgtattttgcttcatgggtatgccaatgaaggatgctttgctgatatgattgatctctttaattcaatggaaagcaatggttttgtagccgactgccatgttttcaccatattaattgatgcatatgctaaacgtggaatgatggatgaagctatgctcatatttactgaaatgcgggaaaaaggagtgagtcccaatgtagtcacctattccactgtaatagccgcactttgcagattgggtaggctgtccgatgctatggacaggttcaatgagatgactgatatgggtgtacagccgaacacagctgtttatcactccctaattcagggtttttgtatgcatggtgatttggttaaagttaaggaatttgtttctgaaatgatgaacaaaggtattcctcgtcctgacattgcgttcttcacttcagtaattaactctttatgcaaagaaggaagggttatgaatgcacaagtatctttgacttggtta

SEQ ID NO: 2146 - DNA, 1788 bp, Triticum aestivum
  source 1..1788: mol_type = genomic DNA
atgtggtggcatatagcagtcatccatggctttttcaaggaaggcgaaacaagcaaggcatgcaatctgttccatgaaatgatgcagcaaggtgttgagcccagtgtgtggacatatagttcaatcattgatgcattgtgcaaggccagagcaatggacaaggcagagctagtgcttcagcagatggttaacaaaggtgttcaacccaataatgtcacatataattgcatgatccatggatattccacatctgggaggtggaaagaggctgctaaattgtttagagaaatgaaaagccagggccttatacctgatacttttacttgcaacgccttaatgacttacctttgtaagcatggaagaagcaaagaaggtgcagaaatttctgatgccatgactgccaaaggccacaaaccggatatcgtctcatacagtattttgcttcatgggtatgccaatgaaggatgctttgctgatatgattgatctctttaattcaatggaaaggaatggcattgcagccgactgccatgttttcagcatattaattaatggatatgctaaatgtggaatgacggatgaagctatgctgatatttacagaaatgtgggaaaaaggagtgagtcccgatgtagtcacctattccactgtaatagctgcactttccagaatggggaggttgaccgacgctatggaaaaatttaatcagatgattgccatgggaattcaaccgaacacagccatttatcactccctaattcagggtttttgcatagacggtgatttggttaaagccaagcagctggtttctgaaatgatgaacagaggtattcctcggcctaacattgtgttcttcaatttagtaataaacagtctgtgcaaagaaggaagggttatggatgcacatgatgtcttagacttggttataggcataggtgagaggcctaatgtcattacatttaattcactgattgacggatattgcttagtcgggaagatggataaagcattcaaaatacttgatgtcatgaaatcagttggtgttgagtctgatgttgttacttatagtgcacttcttgatggctattctaaaaatagaaggattgatgatgctttgactttgtttagagaaatgccgcataagagaattaaatctgacactgttacatatggcatcgtgttggatgggttgtttcatgctgggagaactgttgctgcaatgaaaatgttccatgagatgatcaaaagtggaacaacagtgagtatttacacatacagtataatacttggaggtctttgtagaaataattgtgtagacgatgcgattgcactgttccagaaattacgatcaatgaatgtaaagttcaatattgaaatactcaataccatgattaatgcaatgtacaaggttcaaagaaaagaagaagctaaggatttgtttactacaatatcagccaatgggttggtgcccagtgaatctacttatgcagtaatgataagaaatcttctgaaagacggagcagtggaagatgctgacaatatgttttcatcaatggacaacagtggtatcgttcccagttcccatcttataaatgatatcatcagaatgttgttggaaaaaggtgagatagccaaggctggaaattatttgtctaaagttgatgggaagagtatctcacttgaagcttcaactacctcattgatgttgtctctcttttcaaggaaagggaaacatcaggaggatattaagttgctccctgcaaagtatcaaatttttgatggatttagt

SEQ ID NO: 2147 - DNA, 1758 bp, Triticum aestivum
  source 1..1758: mol_type = genomic DNA
atgtccaacctccgcctcctccgccgcagctcctcctccatgtccaccaccacgtcgccgccctcgcgctcctggtccccccattcggcctttgccgcggccacagagcgcgtgcgcgccaggacgctcagccaagacgatgcacaccacctgttcgacgaattgctgcggcaggccaccccggtccacgagcgctccctcaacggcttcctcgccgccctcgcgcgtgctacgtcctctgccgcttgcatcagagatggtcccgccctcgccatcgccctcttcaatcgcgtgtgccgagaacaagccggcccgcgggtggcgcctctcacagtccacacctacggcatcctcatggaatgttgttgtcgggcgggtcacccggaactagggcttgccatattcagccgtcttctcaggacggggctcaagacaaacgagatagtcggcagcaccttcctcaagtgcctctcctacgcaaaacggacggatgaggctctgaatgtgttgcttcataggatgcccgagctcggctgtgtgcctaatgccttctcatactccattgttctgaagagcttatgcaacaatagcatgagtcagcgggcgctcgacctgctccagaggatggcgaaagaaggaggtggctgcttccttaatgtggtgacacatagcacggtcatccatggcttctttaaggaaggtgaaataggcaaggcatgcactctgttccatgaaatgatgcagcaaggtgttgtgcccaatgtgtggacgtataactcgattattgatgcattgtgcaaggccagagcaatggacaaggcagagctagtccttcgtcagatggttgctaaaggtgctcaacccgatacagtgacatataattgcttgatcaatggatatgccacatctgggcggttgaaagaggctgctaaaatgttcagagaaatgaaaagccggggtcttacaccaaatattgttacctgcggctcgttaacgacttccctttgcaagcatggaagaagcaaagaagctagagaaatatttgattccatgacttccaaaggccacagagctaatgtcgtctcatactctattttgcttcatgggtatgccaatgaaggatgctttgctgatatgatttatctctttaattcaatgaaaagcaacggtattgcagccgactgccgtgttttcaacatattaattaatggatatgctaaacgtggaatgatggatgaagctgtgctgatatttactgaaatgcgggaaaaaggagtgagtcctgatgtagtcacctataccactgtaatagccgcactttccagaatgggtaggttgaccgatgctgtggacgaattcgatgagatgattgcaatgggagtacagccaagcatacctgtttatcagtccctgattcagggtttttgcatcgatggtgatttggttaaagccaaggagctggtttctgaaatgatgaacaaaggtattccttgtcctaacattgtgttcttcaattcagtaataaacagtctgtgcaaagaagaaagggttatggatgcacatgatatctttgacttggttatagacataggtgagaggcctgataccattacatttagttcactgattgacggatattgcttagtcggcaagatggataaagcattcggaatgcttaatgccatggaattagttggtgttgagcctgattgtaacgccttcgatgcggctatatctcccacgtgtcgaagcacgact

SEQ ID NO: 2148 - DNA, 1752 bp, Triticum aestivum
  source 1..1752: mol_type = genomic DNA
atgagccgccgctttgtccccgtcggcagacacatcttagagcagaacatcaaggctcggtaccatgctggagacattggcaccgaggacgcactccacctgtttgacgaattgctccaggttgctgggcgctcctcgatccatgccatcaactgcctcctcaccgttgtcggccgtgattgccctgcgctcggcgtctccctcttcaaccgtgtcgcaaggtccaaggtggcaccctgcagtatcacctatgccattctggtcgactgctgctgccgcgctggccgccaggaccttggacacactgccatgggacacgtcatcaagatgggatttcttgcagatgctattatcactttcagccacctactaaaggccatctgtgcagagaacaagaccagctatgcaatggacatcgtactccaggaaatggacatctcgtccatttttgatcggattttccaggaaatgtctagaaatggtgttcaaccagatattgtaacttacactatacagatggattatctttgcaagagcggaagatgcacagaagctaggaagatttttgattctatgatcagtttgggccaaaaaccgaccgttactacctacagcattctgcttcatgggtatgctatggaaaaatcttttcatgatatgctttgtctcattgatttgatggtaggtaatggtattgtaccagatcattatgtctacaacatactcatatctgcatatgctaaagaagaaatggttggtgaggtaatgcatatatttacaaaaatgcggcagcaaggattgaaccctgatgcagtgagctacggaacagtaatagacttactttccaggattggccgaatggatgatgctatgtccctattcaatcaaatgataactgaaggattagctcctggtatcatagttttcaaccaccttattagtggtttttgtacttgtggcaaatgggagaaggttcatgaactattttctgaaatgttggattgcggcatctgtccagacacagtgttcttcaacacagttatggatcgcctttgcaaaaatggaagggttacggaagcccaggatctctttgacctgatggtacacatgggtgtgaagcctgacgtgtgtacttataacacactgatgggtggatacttgttcgttggtaagatggatgaagtgagcaagttacttgacaatatggtctcaattggcatggaaccagatgttatcacctataacatactgattgatggttactctaagaatggaaggatagatgatgcattggttgttttcagggaaatgttggacacgaagggtaagccgtctgttatcagttttaatattatgattggtgcattgcttaaatgtggtaggaaggcagaagccaaagatttgtttgacggtatctgggccaacggattagtgcctgacattgttacatatagcttaatgatacaaaaactaatagaagaaggttctctacaagagtctgatgatctattcgtttctatggagaagaatgggtgtgctgccaactcccgtatgctaaatgctatagttagaagcttacttcagaagggggaggtgcccagggctgggacttatctgtctaaaattgatgagaggagcttcatccttgaagcttccacagctagcttgttgactgcacttgcgtcaagggggaaaggccaggaatataaggagttactccccgaaaaatactctgaactgctaatcgaggcc

SEQ ID NO: 2149 - DNA, 1752 bp, Triticum aestivum; identical to SEQ ID NO: 2148
  source 1..1752: mol_type = genomic DNA

SEQ ID NO: 2150 - DNA, 1752 bp, Triticum aestivum; identical to SEQ ID NO: 2148
  source 1..1752: mol_type = genomic DNA

SEQ ID NO: 2151 - DNA, 1635 bp, Triticum aestivum
  source 1..1635: mol_type = genomic DNA
atgagccgccgctttccccctgtcggcagacgcatcttggagaggagaattgaagaacggtacagcgccagagacattggcactgacgacacactcaacctgttcgacgaattgatccaggttgctgggccttcctcggtccgcgcaatcaactgcctcctcaccgtcgtcggccgtgattgccccgcactcggcgtctccctcttcaaccgtgttgcaagagccaaggtgcctccacacaatatcacctatggcattctagtcgactgctgctgccgtgctggccgcttggaccttggacacgctgccatgggacacgtcattaagttgggatttacagcagaagctatcgtcaatttcagccacctactcaaggccatctgtgcagtgaagaagaccagctatgcaatggacatcgtactccgagtaatgcctgagtttaactgcacaccgaacattttctcctacagcattcttttcaagggtctttgcaatgaaaggagaagccaagaggctcttgagctgattaatattatggttgaggatggaggtagctgccaacctgatgtggtgacctataacactgtaattgatggcttgttgaaagagggtgaggtggaccaagcttacagcctattttctgaaatgctgcgtcagggggtatcaccgaatgttgtgacatgtaattcaatcatctctggcatgtgcaagcttcacgcgatggacaaggctgaggaggttcttcaacagatgcttgatagacgaattctgccagatgttgccacatataatagtctgatacatggatattattcattaggacagtgcgaagaggtggatcggattttcaaggagatgactacaaatggtgttcaaccagatgttgtaacttacaatatacagatggattatctttgcaagaatggaagatgcgcagaagctaggaagatttttgattccatgatcagtttgggccaaaaacctactgttactacctacaacattctgcttcatgggtatgctatggaaagatcttttcatgatatgaattgtctcattgagttgatggatgataatggtatttcaccagatcattatggctacaacatactcatatctgcttatgctaaagaaaaaatggttgatgatgtattgcatatatttacaaaaatgcggcagcaaggattgaaccctgatgttgcgaactatggagcggtaataaacttgctttctagtattggccgaatggatgatgctatgtcccaatacaatcaaatgataaatgaagggttagctcctgatatcatagttttcaactcccttattagtggtttctgttcttgtggcaaatgggagaaggttcatgaactattttctgagatgttggatcgcggcatctgtcccaacacagtgttcttcaccactattatggaccrcctttgcaaaaatggaagggttatagaagcccaagatgtgttcgacctgatggtacacatgggtgtgaagcctgacgtgcgtagtcatgtcacactgatgcatggatactttgcagatggtaagatggatgaaatgaggaagttacttgaaaatatgtgctcaattggcttgaaactgatgttgtcacctatagcatac

SEQ ID NO: 2152 - DNA, 1533 bp, Triticum aestivum
  source 1..1533: mol_type = genomic DNA
atgagccgccgctttccccctgtcggcagacgcatcttggagaggagaattgaagaacggtacagcgccagagacattggcactgacgacacactcaacctgttcgacgaattgatccaggttgctgggccttcctcggtccgcgcaatcaactgcctcctcaccgtcgtcggccgtgattgccccgcactcggcgtctccctcttcaaccgtgttgcaagagccaaggtgcctccacacaatatcacctatggcattctagtcgactgctgctgccgtgctggccgcttggaccttggacacgctgccatgggacacgtcattaagttgggatttacagcagaagctatcgtcaatttcagccacctactcaaggccatctgtgcagtgaagaagaccagctatgcaatggacatcgtactccgagtaatgcctgagtttaactgcacaccgaacattttctcctacagcattcttttcaagggtctttgcaatgaaaggagaagccaagaggctcttgagctgattaatattatggttgaggatggaggtagctgccaacctgatgtggtgacctataacactgtaattgatggcttgttgaaagagggtgaggtggaccaagcttacagcctattttctgaaatgctgcgtcagggggtatcaccgaatgttgtgacatgtaattcaatcatctctggcatgtgcaagcttcacgcgatggacaaggctgaggaggttcttcaacagatgcttgatagacgaattctgccagatgttgccacatataatagtctgatacatggatattattcattaggacagtgcgaagaggtggatcggattttcaaggagatgactacaaatggtgttcaaccagatgttgtaacttacaatatacagatggattatctttgcaagaatggaagatgcgcagaagctaggaagatttttgattccatgatcagtttgggccaaaaacctactgttactacctacaacattctgcttcatgggtatgctatggaaagatcttttcatgatatgaattgtctcattgagttgatggatgataatggtatttcaccagatcattatggctacaacatactcatatctgcttatgctaaagaaaaaatggttgatgatgtattgcatatatttacaaaaatgcggcagcaaggattgaaccctgatgttgcgaactatggagcggtaataaacttgctttctagtattggccgaatggatgatgctatgtcccaatacaatcaaatgataaatgaagggttagctcctgatatcatagttttcaactcccttattagtggtttctgttcttgtggcaaatgggagaaggttcatgaactattttctgagatgttggatcgcggcatctgtcccaacacagtgttcttcaccactattatggaccgcctttgcaaaaatggaagggttatggaagcccaagatctcttccaggcagatcgccggcggcgaccaggcaatgttagccaggttgaaggagatcct

SEQ ID NO: 2153 - DNA, 1779 bp, Triticum aestivum
  source 1..1779: mol_type = genomic DNA
atggtgagcatcggcgagcatgctcgtcctcctaactctgctttccttcttcctaatcccagttcatgcccaggttgcgccggtgcggtggggggcgagcggcgccggcgtcctctgggtcctctgccattaccagattcttccagatccataagtggagctatgagccgccgcgccgttcccgctggcaggcgcatcttggagcagaacatcaaggcccggtaccgggctggagccattggcaccgacgatgcactccacctgtttgacgaattgctccaggttgcctggccctcctcgatcgccgccatcaactgcctcctcattgtcgtcggccgtgattgccctgtgctcgccgtctccctcttcaaccacatcgcaagagccaaggtggcgccccacaatatcacctacggcattctagtcgactgctgcagccgtgctggccgcttggaccttggcttcgctgccatgggccacatcgttaagatgggatttgtggcaagatccgttgtctctttcagccacctgctcagggccgtctgtgcgaagaagaagaccagctacagaatggacatcatgctccaaattatgcctgagcttaactgcataccggatgtttactcctacagcattcttttcaagggcctctgcaatgagaagagaagccaagaggctctcgagctgattcacgtgatggttgagcacggaggtagctgccaacctaatctggtctcatacaacaccgtaattgatggcttgttgaaagagggtgaggtgggcaaggcttacagcctattttgtgaaatggtacagagcgggattttggcaaatattgtgacatacaactcaatcatctctggcatgtgcaaggttcatgcaatggacaaggctgagaaggttcttcaacagatgtttgatagagaaattctgccagatactgccacatatactaccctaatacgtggatattattcatcaggacaatgcaaagaggtggaacgggttttcgagcacatgtctataaatggtgttcaaccaaatatgataacttgcaatatacagatggattatctttgcaagagcggaagatgcgcggaagctaggaagatctttgattctatggtcagtttgggccaaaaaccgtctgttactacctacagtattctgcttcatggttatgttatggaaaaatcatttcatgatatgcattgtctccttgatttgatggtagaaaatggtatctcaccagatcatcatgtctacaacatactcatatctgcatatgctaaagaggaaatggcaagtgaggtaatgcatatatttacaaaaatgcggcagcaaggattgaaccctagtgttgcggactatggagcggtaataaacttgctctccagtattggcagaatggatgatgctatgtcccaattcaatcaaatgatagccgaaggattagctcctgatatcatagttttcaacccccttattagtggtttttgtacttgtggcaaatgggagaagkttcatgaactattttctgaaatgttgaatcgcggcacctatcatgataccgtgttcttcaccacaattatggaccgcctttgcaaaaatggaagggttatggaagcccaagatatgtttgacctgatggtacacgtgggtgttaagcctaatgttcatacttatgccacattgatgcatgggtactttttcgttaggaagatggatgaagtgaggaagttacttggcaatatactctcaattggctcgaaaccggat

SEQ ID NO: 2154 - DNA, 1779 bp, Triticum aestivum
  source 1..1779: mol_type = genomic DNA
atggtgagcatcggcgagcatgctcgtcctcctaactctgctttccttcttcctaatcccagttcatgcccaggttgcgccggtgcggtggggggcgagcggcgccggcgtcctctgggtcctctgccattaccagattcttccagatccataagtggagctatgagccgccgcgccgttcccgctggcaggcgcatcttggagcagaacatcaaggcccggtaccgggctggagccattggcaccgacgatgcactccacctgtttgacgaattgctccaggttgcctggccctcctcgatcgccgccatcaactgcctcctcattgtcgtcggccgtgattgccctgtgctcgccgtctccctcttcaaccacatcgcaagagccaaggtggcgccccacaatatcacctacggcattctagtcgactgctgcagccgtgctggccgcttggaccttggcttcgctgccatgggccacatcgttaagatgggatttgtggcaagatccgttgtctctttcagccacctgctcagggccgtctgtgcgaagaagaagaccagctacagaatggacatcatgctccaaattatgcctgagcttaactgcataccggatgtttactcctacagcattcttttcaagggcctctgcaatgagaagagaagccaagaggctctcgagctgattcacgtgatggttgagcacggaggtagctgccaacctaatctggtctcatacaacaccgtaattgatggcttgttgaaagagggtgaggtgggcaaggcttacagcctattttgtgaaatggtacagagcgggattttggcaaatattgtgacatacaactcaatcatctctggcatgtgcaaggttcatgcaatggacaaggctgagaaggttcttcaacagatgtttgatagagaaattctgccagatactgccacatatactaccctaatacgtggatattattcatcaggacaatgcaaagaggtggaacgggttttcgagcacatgtctataaatggtgttcaaccaaatatgataacttgcaatatacagatggattatctttgcaagagcggaagatgcgcggaagctaggaagatctttgattctatggtcagtttgggccaaaaaccgtctgttactacctacagtattctgcttcatggttatgttatggaaaaatcatttcatgatatgcattgtctccttgatttgatggtagaaaatggtatctcaccagatcatcatgtctacaacatactcatatctgcatatgctaaagaggaaatggcaagtgaggtaatgcatatatttacaaaaatgcggcagcaaggattgaaccctagtgttgcggactatggagcggtaataaacttgctctccagtattggcagaatggatgatgctatgtcccaattcaatcaaatgatagccgaaggattagctcctgatatcatagttttcaacccccttattagtggtttttgtacttgtggcaaatgggagaagtttcatgaactattttctgaaatgttgaatcgcggcacctatcatgataccgtgttcttcaccacaattatggaccgcctttgcaaaaatggaagggttatggaagcccaagatatgtttgacctgatggtacacgtgggtgttaagcctaatgttcatacttatgccacattgatgcatgggtactttttcgttaggaagatggatgaagtgaggaagttacttggcaatatactctcaattggctcgaaaccggat

SEQ ID NO: 2155 - DNA, 1779 bp, Triticum aestivum; identical to SEQ ID NO: 2154
  source 1..1779: mol_type = genomic DNA

SEQ ID NO: 2156 - DNA, 762 bp, Triticum aestivum
  source 1..762: mol_type = genomic DNA
atgtctataaatggtgttcaaccaaatatgataacttacaatatacagatggattatctttgcaagagcggaagatgcgcggaagctaggaagatctttgattctatggtcagtttgggccaaaaaccgtytgttactacmtacagtattctgcttcatggttatgttatggaaaaatcatttcatgatatgcattgtctccttgatttgatggtagaaaatggtatctcaccagatcatcatgtctacaacatactcatatctgcatatgctaaagaggaaatggcaagtgaggtaatgcatatatttacaaaaatgcggcagcaaggattgaaccctagtgttgcggactatggagcggtaataaacttgctttccagtattggcagaatggatgatgctatgtcccaattcaatcaaatgatagccgaaggattagctcctgatatcatagttttcaacccccttattagtggtttttgtacttgtggcaaatgggagaaggttcatgaactattttctgaaatgttgaatcgcggcacctatcctgataccgtgttcttcaccacaattatggaccgcctttgcaaaaatggaagggttatggaagcccaagatatgtttgacctgatggtacacgtgggtgttaagcctaatgttcatacttatgccacattgatgcatgggtactttttcgttaggaagatggatgaagtgaggaagttacttggcaatatgctctcaattggctcgaaaccggat

SEQ ID NO: 2157 - DNA, 1779 bp, Triticum aestivum; identical to SEQ ID NO: 2154
  source 1..1779: mol_type = genomic DNA

SEQ ID NO: 2158 - DNA, 1779 bp, Triticum aestivum
  source 1..1779: mol_type = genomic DNA
atggtgagcatcggcgagcatgctcgtcctcctaactctgctttccttcttcctaatcccagttcatgcctaggttgcgtcggtgcggtggggggcgagcggcaccggcgtcctctgggtcctctgcgattaccagattcttccagatccataggtggagctatgagccgccgcaccgtccccgctggcaggcgcatcttggagcagaacatcaaggcccggtaccgggctggagccattggcaccgacgatgcactccacctgtttgacgaattgctccaggttgcctggccctcctcgatcgccgccatcaactgcctcctcattgtcgtcggccgtgattgccctgcgctcgccgtctccctcttcaaccacatcgcaagagccaaggtggcgccccacaatatcacctacggcattctagtcgactgctgcagccatgctggccgcttggaccttggcttcgctgccatgggccacatcgttaagacggtatttgcggcaggatccattgtctctttcagccacctgctcagggccgtctgtgcggagaagaagaccagctacggaatggacatcgtgctccgaattatgcctgagcttaactgcataccggatgtttactcctacagcatgcttttcaagggcctctgcaacgagaagagaagccaagaggctctcgagatgattcacgtgatggttgagcacggaggtagctgccaacctaatctggtctcatacaacgccgtaattgatggcttgttgaaagagggtgaggtgggcaaggcttacatcctattttgtgaaatggtacagagcgggattttggcaaatattgtgacctacaactcaattatctctggcatgtgcaaggttcatgcaatggacaaggctgagaaggttcttcaacagatgtttgatagagaaattctgccagatactgccacatatactagcctaatacatggatgttattcatcaggacaatgcaaagaggtggaacgggttttcgagcacatgtctataaatggtgttcaaccaaatatgataacttacaatatacagatggattatctttgcaagagcggaagatgcgcggaagctaggaagatctttgattctatggtcagtttgggccaaaaaccgtctgttactacctacagtattctgcttcatggttatgttatggaaaaatcatttcatgatatgcattgtctccttgatttgatggtagaaaatggtatctcaccagatcatcatgtctacaacatactcatatctgcatatgctaaagaggaaatggcaagtgaggtaatgcatatatttacaaaaatgcggcagcaaggattgaaccctagtgttgcggactatggagcggtaataaacttgcattccagtattggcagaatggatgatgctatgccccaattcaatcaaatgatagccgaaggattagctcctgatatcatagttttcaacccccttattagtggtttttgtacttgtggcaaatgggagaaggttcatgaactattttctgaaatgttgaatcgcggcacctatcatgataccgtgttcttcaccacaattatggaccgcctttgcaaaaatggaagggttatggaagcccaagatatgtttgacctgatggtacacgtgggtgttaagcctaatgttcatacttatgccacattgatgcatgggtactttttcgttaggaagatggatgaagtgaggaagttacttggcaatatgctctcaattggctcgaaaccggat

SEQ ID NO: 2159 - DNA, 1779 bp, Triticum aestivum
  source 1..1779: mol_type = genomic DNA
atggtgagcatcggcgagcatgctcgtcctcctaactctgctttccttcttcctaatcccagttcatgcccaggttgcgtcggtgcggtggggggcgagcggcaccggcgtcctctgggtcctctgccattaccagattcttccagatccataggtggagctatgagccgccgcgccgtccccgctggcaggcgcatcttggagcagaacatcaaggcccggtaccgggctggagccattggcaccgacgatgcactccacctgtttgacgaattgctccaggttgcctggccctcctcgatcgccgccatcaactgcctcctcattgtcgtcggccgtgattgccctgcgctcgccgtctccctcttcaaccacatcgcaagagccaaggtggcgccccacaatatcacctacggcattctagtcgactgctgcagccgtgctggccgcttggaccttggcttcgctgccatgggccacatcgttaagacgggatttgcggcaggatccgttgtctctttcagccacctgctcagggccgtctgtgcggagaagaagaccagctacggaatggacatcgtgctccgaattatgcctgagcttaactgcataccggatgtttactcctacagcattcttttcaagggcctctgcaacgagaagagaagccaagaggctctcgagctgattcacgtgatggttgagcacggaggtagctgccaacctaatctggtctcatacaacaccgtaattgatggcttgttgaaagagggtgaggtgggcaaggcttacagcctattttgtgaaatggtacagagcgggattttggcaaatattgtgacctacaactcaatcatctctggcatgtgcaaggttcatgcaatggacaaggctgagaaggttcttcaacagatgtttgatagagaaattctaccagatactgccacatatactagcctaatacatggatattattcatcaggacaatgcaaagaggtggaacgggttttcgagcacatgtctataaatggtgttcaaccaaatatgataacttacaatatacagatggattatctttgcaagagcggaagatgcgcggaagctaggaagatctttgattctatggtcagtttgggccaaaaaccgtctgttactacctacagtattctgcttcatggttatgttatggaaaaatcatttcatgatatgcattgtctccttgattttatggtagaaaatggtatctcaccagatcatcatgtctacaacatactcatatctgcatatgctaaagaggaaatggcaagtgaggtaatgcatatatttacaaaaatgcggcagcaaggattgaaccctagtgttgcggactatggagcggtaataaacttgctttccagtattggcagaatggatgatgctatgtcccaattcaatcaaatgatagccgaaggattagctcctgatatcatagttttcaacccccttattagtggtttttgtacttgtggcaaatgggagaaggttcatgaactattttctgaaatgttgaatcgcggcacctatcatgataccgtgttcttcaccacaattatggaccgcctttgcaaaaatggaagggttatggaatcccaagatatgtttgacctgatggtacacgtgggtgttaagcctaatgttcatacttatgccacattgatgcatgggtactttttcgttaggaagatggatgaagtgaggaagttagttggcaatatgctctcaattggctcgaaaccggat

SEQ ID NO: 2160 - DNA, 1779 bp, Triticum aestivum
  source 1..1779: mol_type = genomic DNA
atggtgagcatcggcgagcatgctcgtcctcctaactctgctttccttcttcctaatcccagttcatgcctaggttgcgtcggtgcggtggggggcgagcggcaccggcgtcctctgggtcctctgcgattaccagattcttccagatccataggtggagctatgagccgccgcgccgtccccgctggcaggcgcatcttggagcagaacatcaaggcccggtaccgggctggagccattggcaccgacgatgcactccacctgtttgacgaattgctccaggttgcctggccctcctcgatcgccgccatcaactgcctcctcattgtcgtcggccgtgattgccctgcgctcgccgtctccctcttcaaccacatcgcaagagccaaggtggcgccccacaatatcacctacggcattctagtcgactgctgcagccatgctggccgcttggaccttggcttcgctgccatgggccacatcgttaagacggtatttgcggcaggatccattgtctctttcagccacctgctcagggccgtctgtgcggagaagaagaccagctacggaatggacatcgtgctccgaattatgcctgagcttaactgcataccggatgtttactcctacagcatgcttttcaagggcctctgcaacgagaagagaagccaagaggctctcgagatgattcacgtgatggttgagcacggaggtagctgccaacctaatctggtctcatacaacgccgtaattgatggcttgttgaaagagggtgaggtgggcaaggcttacatcctattttgtgaaatggtacagagcgggattttggcaaatattgtgacctacaactcaattatctctggcatgtgcaaggttcatgcaatggacaaggctgagaaggttcttcaacagatgtttgatagagaaattctgccagatactgccacatatactagcctaatacatggatgttattcatcaggacaatgcaaagaggtggaacgggttttcgagcacatgtctataaatggtgttcaaccaaatatgataacttacaatatacagatggattatctttgcaagagcggaagatgcgcggaagctaggaagatctttgattctatggtcagtttgggccaaaaaccgtctgttactacctacagtattctgcttcatggttatgttatggaaaaatcatttcatgatatgcattgtctccttgatttgatggtagaaaatggtatctcaccagatcatcatgtctacaacatactcatatctgcatatgctaaagaggaaatggcaagtgaggtaatgcatatatttacaaaaatgcggcagcaaggattgaaccctagtgttgcggactatggagcggtaataaacttgcattccagtattggcagaatggatgatgctatgccccaattcaatcaaatgatagccgaaggattagctcctgatatcatagttttcaacccccttattagtggtttttgtacttgtggcaaatgggagaaggttcatgaactattttctgaaatgttgaatcgcggcacctatcctgataccgtgttcttcaccacaattatggaccgcctttgcaaaaatggaagggttatggaagcccaagatatgtttgacctgatggtacacgtgggtgttaagcctaatgttcatacttatgccacattgatgcatgggtactttttcgttaggaagatggatgaagtgaggaagttacttggcaatatgctctcaattggctcgaaaccggat

SEQ ID NO: 2161 - DNA, 1779 bp, Triticum aestivum
  source 1..1779: mol_type = genomic DNA
atggtgagcatcggcgagcatgctcgtcctcctaactctgctttccttcttcctaatcccagttcatgcccaggttgcgtcggtgcggtggggggcgagcggcatcggcgtcctctgggtcctctgccattaccagattcttccagatccataggtggagctatgagccgccgcgccgtccccgctggcaggcgcatcttggagcagaacatcaaggcccggtaccgggctggagccattggcaccgacgatgcactccacctatttgacgaattgctccaggttgcctggccctcctcgatcgccgccatcaactgcctcctcattgtcgtcggccgtgattgccctgcgcttgccgtctccctcttcaaccacatcgcaagagccaaggtggcgccccacaatatcacctacggcattctagtcgactgctgcagccatgctggccgcttggaccttggcttcgctgccatgggccacatcgttaagacggtatttgcgacaggatccattgtctctttcagccacctgctcagggccgtctgtgcggagaagaagaccagctacggaatggacatcgtgctccgaattatgcctgagcttaactgcataccggatgtttactcctacagcatgcttttcaagggcctctgcaacgagaagagaagccaagaggctctcgagatgattcacgtgatggttgagcacggaggtagctgccaacctaatctggtctcatacaacgccataattgatggcttgttgaaagagggtgaggtgggcaaggcttacagcctattttgtgaaatggtacagagcgggattttggcaaatattgtgacctacaactcaatcatctctggcatgtgcaaggttcatgcaatggacaaggctgagaaggttcttcaacagatgtttgatagagaaattctgccagatactgccacatatactagcctaatacatggatgttattcatcaggacaatgcaaagaggtggaacgggttttcgagcacatgtctataaatggtgttcaaccaaatatgataacttacaatatacagatggattatctttgcaagagcggaagatgcacggaagctaggaagatctttgattctatggtcagtttgggccaaaaaccgtctgttactacctacagtattctgcttcatggttatgttatggaaaaatcatttcatgatatgcattgtctccttgatttgatggtagaaaatggtatctcaccagatcatcatgtctacaacatactcatatctgcatatgctaaagaggaaatggcaagtgaggtaatgcatatatttacaaaaatgcggcggcaaggattgaaccctagtgttgcggactatggagcggtaataaacttgctttccagtattggcagaatggatgatgctatgccccaattcaatcaaatgatagccgaagtattagctcctgatatcatagttttcaacccccttattagtggtttttgtacttgtggcaaatgggagaaggttcatgaactattttctgaaatgttgaatcgcggcacctatcctgataccgtgttcttcaccacaattatggaccgcctttgcaaaaatggaagggttatggaagcccaagatatgtttgacctgatggtacacgtgggtgttaagcctaatgttcatacttatgccacattgatgcatgggtactttttcgttaggaagatggatgaagtgaggaagttacttggcaatatgctctcaattggctcgaaaccggat

SEQ ID NO: 2162 - DNA, 1779 bp, Triticum aestivum
  source 1..1779: mol_type = genomic DNA
atggtgagcatcggcgagcatgctcgtcctcctaactctactttccttcttcctaatcccagttcatgcccaggttgcgccggtgcggtggggggcgagcggcaccggcgtcctctgggtcctctgccattaccagattcttccagatccataggtggagctatgagccgccgcgccgtccccgctggcaggcgcatcttggagcagaacatcaaggcccggtaccgggctggagccattggcaccgacgatgcactccacctgtttgacgaattgctccaggttgcctggccctcctcgatcgccgccatcaactgcctcctcattgtcgtcggccgtgattgccctacgctcgccgtctccctcttcaaccacatcgcaagagccaaggtggcgccccacaatatcacctacggcattctagtcgactgctgcagccgtgctggccgcttggaccttggcttcgctgccatgggccacatcgttaagacgggatttgcggcaggatccgttgtctcttttagccacctgctcagggccgtctgtgcggagaagaagaccagctacggaatggacatcgtgctccgaattatgcctgagcttaactgcataccggatgtttactcctacagcattcttttcaagggcctctgcaacgagaagagaagccaagaggctctcgagctgattcacgtgatggttgagcacggaggtagctgccaacctaatctggtctcatacaacaccgtaattgatggcttgttgaaagagggtgaggtgggcaaggcttacagcctattttgtgaaatggtacagagcgggattttggcaaatattgtgacctacaactcaatcatctctggcatgtgcaaggttcatgcaatggacaaggctgagaaggttcttcaacagatgtttgatagagaaattctgccagatactgccacatatactagcctaatacatggatattattcatcaggacaatgcaaagaggtggaacgggttttcgagcacatgtctataaatggtgttcaaccaaatatgataacttacaatatacagatggattatctttgcaagagcggaagatgcgcggaagctaggaagatctttgattctatggtcagtttgggccaaaaaccgtttgttactacatacagtattctgcttcatggttatgttatggaaaaatcatttcatgatatgcattgtctccttgatttgatggtagaaaatggtatctcaccagatcatcatgtctacaacatactcatatctgcatatgctaaagaggaaatggcaagtgaggtaatgcatatatttacaaaaatgcggcagcaaggattgaaccctagtgttgcggactatggagcggtaataaacttgctttccagtattggcagaatggatgatgctatgtcccaattcaatcaaatgatagccgaaggattagctcctgatatcatagttttcaacccccttattagtggtttttgtacttgtggcaaatgggagaaggttcatgaactattttctgaaatgttgaatcgcggcacctatcctgataccgtgttcttcaccacaattatggaccgcctttgcaaaaatggaagggttatggaagcccaagatatgtttgacctgatggtacacgtgggtgttaagcctaatgttcatacttatgccacattgatgcatgggtactttttcgttaggaagatggatgaagtgaggaagttacttggcaatatgctctcaattggctcgaaaccggat

SEQ ID NO: 2163 - DNA, 1779 bp, Triticum aestivum
  misc_feature 1269: note = n is a, c, g, or t
  source 1..1779: mol_type = genomic DNA
atggtgagcatcggtgagcatgctcgtcctcctaactctgctttccttcttcctaatcccagttcatgcccaggttgcgccggtgcggtggggggcgagcggcgccggcgtcctctgggtcctttgccattaccagattcttccagatccataggtggagctatgagccgccgcgccgtccccgctggcaggcgcatcttggagcagaacatcaaggcccggtaccgggctggagccattggcaccgacgatgcactccacctgtttgacgaattgctccaggttgcctggccctcctcgatcgccgccatcaactgcctcctcattggcgtcggccgtgattgccctgcgctcgccgtctccctcttcaaccacatcgcaagagccaaggtggcgccccacaatatcacctacggcattctagtcgactgctgcagccgtgctggccgcttggaccttggcttcgctgccatgggccacatcgttaagacgggatttgcggcaggatccgttgtctctttcagccacctgctcagggccgtctgtgcgaagaagaagaccagctacggaatggacatcgtgctccgaattatgcctgagcttaactgcataccggatgtttactcctacggcattcttttcaagggcctctgcaacgagaagagaagccaagaggctctcgagctgattcacgtgatggttgagcacggaggtagctgccaacctaatctggtctcatacaacaccgtaattgatggcttgttgaaagagggtgaggtgggcaaggcttacatcctattttgtgaaatggtacagagcgggattttggcaaatcttgtgacctacaactcaatcatctctggcatgtgcaaggttcatgcaatggacaaggctgagaaggttcttcaacagatgtttgatagagaaattctgccagatactgccacatatactagcctaatacatggatattattcatcaggacaatgcaaagaggtggaacgggttttcgagcacatgtctataaatggtgttcaaccaaatatgataacttacaatatacagatggattatctttgcaagagcggaagatgcgcggaagctaggaagatctttgattctatggtcagtttgggccaaaaaccgtctgttactacctacagtattctgcttcatggttatgttatggaaaaatcatttcatgatatgcattgtctccttgatttgatggtagaaaatggtatctcaccagatcatcatgtctacaanatactcatatctgcatatgctaaagaggaaatggcaagtgaggtaatgcatatatttacaaaaatgcggcagcaaggattgaaccctagtgttgcggactatggagcggtaataaacttgctttccagtattggcagaatggatgatgctatgtcccaattcaatcaaatgatagccgaaggattagctcctgatatcatagttttcaacccccttattagtggtttttgtacttgtggcaaatgggagaaggttcatgaactattttctgaaatgttgaatcgcggcacctatcctgataccgtgttcttcaccacaattatggaccgcctttgcaaaaatggaagggttatggaagcccaagataagtttgacctgatggtacacatgggtgttaagcctaatgttcatacttatgccacattgatgcatcggtactttttcgttatgaagatggatgaagtgaggaagttacttggcaatatgctctcaattggctcgaaaccggat

SEQ ID NO: 2164 - DNA, 1779 bp, Triticum aestivum
  source 1..1779: mol_type = genomic DNA
atggtgagcatcggcgagcatgctcgtcctcctaactctgctttccttcttcctaatcccagttcatgcccaggttgcgtcggtgcggtggggggcgagcggcaccggcgtcctctaggtcctctgccattaccagattcttccagatccataggtggagctatgagccgccgcgccgtccccgctggcaggcgcatcttggagcagaacatcaaggcccggtaccgggctggagccattggcaccgacgatgcactccacctgtttgacgaattgctccaggttgcctggccctcctcgatcgccaccatcaactgcctcctcattgtcgtcggccgtgattgccctgcgctcgccgtctccctcttcaaccacatcgcaagagccaatgtggcgccccacaatatcacctacggcattctagtcgactgctgcagccgtgctggccgcttggaccttggcttcgctgccatgggccacatcgttaagacgggatttgcggcaggatccgttatctctttcagccacctgctcagggccgtctgtgcggagaagaagaccagctacggaatggacatcgtgctccgaattatgcctgagcttaactgcataccggatgtttactcctacagcattcttttcaagggcctctgcaacgagaagagaagccaagaggctctcgagctgattcacgtgatggttgagcacggaggtagctgccaacctaatctggtctcatacaacaccgtaattgatggcttgttgaaagagggtgaggtgggcaaggcttacagcctattttgtgaaatggtacagagcgggattttggcaaatattgtgacctacaactcaatcatctctggcatgtgcaaggttcatgcaatggacaaggctgagaaggttcttcaacagatgtttgatagagaaattctaccagatactgccacatatactagcctaatacatggatattattcatcaggacaatgcaaagaggtggaacgggttttcgagcacatgtctataaatggtgttcaaccaaatatgataacttacaatatacagatggattatctttgcaagagcggaagatgcgcggaagctaggaagatctttgattctatggtcagtttgggccaaaaaccgtctgttactacctacagtattctgcttcatggttatgttatggaaaaatcatttcatgatatgcattgtctccttgattttatggtagaaaatggtatctcaccagatcatcatgtctacaacatactcatatctgcatatgctaaagaggaaatggcaagtgaggtaatgcatatatttacaaaaatgcggcagcaaggattgaaccctagtgttgcggactatggagcggtaataaacttgctttccagtattggcagaatggatgatgctatgtcccaattcaatcaaatgatagccgaaggattagctcctgatatcatagttttcaacccccttattagtggtttttgtacttgtggcaaatgggagaaggttcatgaactattttctgaaatgttgaatcgcggcacctatcatgataccgtgttcttcaccacaattatggaccgcctttgcaaaaatggaagggttatggaatcccaagatatgtttgacctgatggtacacgtgggtgttaagcctaatgttcatacttatgccacattgatgcatgggtactttttcgttaggaagatggatgaagtgaggaagttagttggcaatatgctctcaattggctcgaaaccggat

SEQ ID NO: 2165 - DNA, 1779 bp, Triticum aestivum
  source 1..1779: mol_type = genomic DNA
atggtgagcatcggcgagcatgctcgtcctcctaactctgctttccttcttcctaatcccagttcatgcccaggttgcgccggtgcggtggggggcgagcggcgccggcgtcctctgggtcctctgccattaccagattcttccagatccataggtggagctatgagccgccgcgctgtccccgctggcaggtgcatcttggagcagaacatcaaggcccggtaccgggctggagccattggcaccgacgatgcactccacctgtttgacgaactgctccaggttgcctggccctcctcgatcgccgccatcaactgccccctcattgtcgtcggccgtgattgccctgcgctcgccgtctccctcttcaaccacatcgcaagagccaaggtggcgccccacaatatcacctacggcattctagtcgactgctgcagccgtgctggccgcttggaccttggcttcgctgccatgggccacatcgttaagacgggatttgcggcaggatccgttgtctctttcagccacctgctcagggccgtctgtgcgaagaagaagaccagctacggaatggacatcgtgctccgaattatgcctgagcttaactgcataccggatgtttactcctacggcattcttttcaagggcctctgcaacgagaagagaagccaagaggctctcgagctgattcacgtgatggttgagcacggaggtagctgccaacctaatctggtctcatacaacaccataattgatggcttgttgaaagagggtgaggtgggcaaggcttacatcctattttgtgaaatggtacagagcgggattttggcaaatattgtgacctacaactcaatcatctctggcatgtgcaaggttcatgcaatggacaaggctgagaaggttcttcaacagatgtttgatagagaaattctgccagatactgccacatatactagcctaatacatggatattattcatcaggacaatgcaaagaggtggaacgggttttcgagcacatgtctataaatggtgttcaaccaaatatgataacttacaatatacagatggattatctttgcaagagcggaagatgcgcggaagctaggaagatctttgattctatggtcagtttgggccaaaaaccgtctgttactacctacagtattctgcttcatggttatgttatggaaaaatcatttcatgatatgcattgtctccttgatttgatggtagaaaatggtatctcaccagatcatcatgtctacaagatactcatatctgcatatgctaaagaggaaatggcaagtgaggtaatgcatatatttacaaaaatgcggcagcaaggattgaaccctagtgttgcggactatggagcggtaataaacttgctttccagtattggcagaatggatgatgctatgtcccaattcaatcaaatgatagccgaaggattagctcctgatatcatagttttcaacccccttattagtggtttttgtacttgtggcaaatggcagaaggttcatgaactattttctgaaatgttgaatcgcggcacctatcctgataccgtgttcttcaccacaattatggactgcatttgcaaaaatggaagggttatggaagcccaagatatgtttgacctgatggtacacgtgggtgttaagcctaatgttcatacttatgccacattgatgcatgggtactttttcgttaggaagatggatgaagtgaggaagttacttggcaatatgctctcaattggctcgaaaccggat

SEQ ID NO: 2166 - DNA, 1779 bp, Triticum aestivum
  source 1..1779: mol_type = genomic DNA
atggtgagcatcggcgagcatgctcgtcctcctaactctgctttccttcttcctaatcccagttcatgcccaggttgcgccggtgcggtggggggcgagcggcgccggcgtcctctgggtcctctgccactaccagattcttccagatccataggtggagctatgagccgccgcgccgtccccgctggcaggcgcatcttggagcagaacatcaaggcccggtaccgggctggagccattggcaccgacgatgcactccacctgtttgacgaattgctccaggttgcctggccctcctcgatcgccgccatcaactgcctcctcattgtcgtcggccgtgattgccctgcgctcgccgtctccctcttcaaccacatcgcaagagccaaggtggcgccccacaatatcacctacggcattctagtcgactgctgcagccgtgctggccgcttggaccttggcttcgctgccatgggccacatcgttaagacgggatttgcggcaggatccgttgtctcttttagccacctgctcagggccgtctgtgcggagaagaagaccagctacggaatggacatcgtgctccgaattatgcctgagcttaactgcataccggatgtttactcctacagcattcttttcaagggcctctgcaacgagaagagaagccaagaggctctcgagctgattcacgtgatggttgagcacggaggtagctgccaacctaatctggtctcatacaacaccgtaattgatggcttgttgaaagaaggtgaggtgggcaaggcttacagcctattttgtgaaatggtacagagcgggattttggcaaatattgtgacctacaactcaatcatctctggcatgtgcaaggttcatgcaatggacaaggctgagaaggttcttcaacagatgtttgatagagaaattctgccagatactgccacatatactagcctaatacatggatattattcatcaggacaatgcaaagaggtggaacgggttttcgagcacatgtctataaatggtgttcaaccaaatatgataacttacaatatacagatggattatctttgcaagagcggaagatgcgcggaagctaggaagatctttgattctatggtcagtttgggccaaaaaccgtttgttactacatacagtattctgcttcatggttatgttatggaaaaatcatttcatgatatgcattgtctccttgatttgatggtagaaaatggtatctcaccagatcatcatgtctacaacatactcatatctgcatatgctaaagaggaaatggcaagtgaggtaatgcatatatttacaaaaatgcggcagcaaggattgaaccctagtgttgcggactatggagcggtaataaacttgctttccagtattggcagaatggatgatgctatgtcccaattcaatcaaatgatagccgaaggattagctcctgatatcatagttttcaacccccttattagtggtttttgtacttgtggcaaatgggagaaggttcatgaactattttctgaaatgttgaatcgcggcacctatcctgataccgtgttcttcaccacaattatggaccgcctttgcaaaaatggaagggttatggaagcccaagatatgtttgacctgatggtacacgtgggtgttaagcctaatgttcatacttatgccacattgatgcatgggtactttttcgttaggaagatggatgaagtgaggaagttacttggcaatatgctctcgattggctcgaaaccggat

SEQ ID NO: 2167 - DNA, 1779 bp, Triticum aestivum
  source 1..1779: mol_type = genomic DNA
atggtgagcatcggcgagcatgctcgtcctcctaactctgctttccttcttcctaatcccagttcatgcccaggttgcgtcggtgcggtggggggcgagcggcaccggcgtcctctgggtcctctgccattaccagattcttccagatccataggtggagctatgagccgccgcgccgtccccgctggcaggcgcatcttggagcagaacatcaaggcccggtaccgggctggagccattggcaccgacgatgcactccacctgtttgacgaattgctccaggttgcctggccctcctcgatcgccgccatcaactgcctcctcattgtcgtcggccgtgattgccctgcgctcgccgtctccctcttcaaccacatcgcaagagccaaggtggcgccccacaatatcacctacggcattctagtcgactgctgcagccgtgctggccgcttggaccttggcttcgctgccatgggccacatcgttaagacgggatttgcggcaggatccgttgtctctttcagccacctgctcagggccgtctgtgcggagaagaagaccagctacggaatggacatcgtgctccgaattatgcctgagcttaactgcataccggatgtttactcctacagcattcttttcaagggcctctgcaacgagaagagaagccaagaggttctcgagctgattcacgtgatggttgagcacggaggtagctgccaacctaatctggtctcatacaacaccgtaattgatggcttgttgaaagagggtgaggtgggcaaggcttacagcctattttgtgaaatggtacagagcgggattttggcaaatattgtgacctacaactcaatcatctctggcatgtgcaaggttcatgcaatggacaaggctgagaaggttcttcaacagatgtttgatagagaaattctgccagatactgccacatatactagcctaatacatggatgttattcatcaggacaatgcaaagaggtggaacgggttttcgagcacatgtctataaatggtgttcaaccaaatatgataacttacaatgtacagatggattatctttgcaagagcggaagatgcgcggaagctaggaagatctttgattctatggtcagtttgggccaaaaaccgtctgttactacctacagtattctgcttcatggttatgttatggaaaaatcatttcatgatatgcattgtctccttgatttgatggtagaaaatggtatctcaccagatcatcatgtctacaacatactcatatctgcatatgctaaagaggaaatggcaagtgaggtaatgcatatatttacaaaaatgcggcagcaaggattgaaccctagtgttgcggactatggagcggtaataaacttgctttccagtattggcagaatggatgatgctatgtcccaattcaatcaaatgatagccgaaggattagctcctgatatcatagttttcaacccccttattagtggtttttgtacttgtggcaaatgggagaaggttcatgaactattttctgaaatgttgaatcgcggcacctatcctgataccgtgttcttcaccacaattatggaccgcctttgcaaaaatggaagggttatggaagcccaagatatgtttgacctgatggtacacgtgggtgttaagcctaatgttcatacttatgccacattgatgcatgggtactttttcgttaggaagatggatgaagtgaggaagttacttggcaatatgctctcaattggctcgaaaccggat

SEQ ID NO: 2168 - DNA, 1779 bp, Triticum aestivum
  source 1..1779: mol_type = genomic DNA
atggtgagcatcggcgagcatgctcgtcctcctaactctgctttccttcttcctaatcccagttcatgcccaggttgcgtcggtgcggtggggggcgagcggcatcggcgtcctctgggtcctctgccattaccagattcttccagatccataggtggagctatgagccgccgcgccgtccccgctggcaggcgcatcttggagcagaacatcaaggcccggtaccgggctggagccattggcaccgacgatgcactccacctatttgacgaattgctccaggttgcctggccctcctcgatcgccgccatcaactgcctcctcattgtcgtcggccgtgattgccctgcgctcgccgtctccctcttcaaccacatcgcaagagccaaggtggcgccccacaatatcacctacggcattctagtcgactgctgcagccatgctggccgcttggaccttggcttcgctgccatgggccacatcgttaagacggtatttgcgacaggatccattgtctctttcagccacctgctcagggccgtctgtgcggagaagaagaccagctacggaatggacatcgtgctccgaattatgcctgagcttaactgcataccggatgtttactcctacagcatgcttttcaagggcctctgcaacgagaagagaagccaagaggctctcgagatgattcacgtgatggttgagcacggaggtagctgccaacctaatctggtctcatacaacgccataattgatggcttgttgaaagagggtgaggtgggcaaggcttacagcctattttgtgaaatggtacagagcgggattttggcaaatattgtgacctacaactcaatcatctctggcatgtgcaaggttcatgcaatggacaaggctgagaaggttcttcaacagatgtttgatagagaaattctgccagatactgccacatatactagcctaatacatggatgttattcatcaggacaatgcaaagaggtggaacgggttttcgagcacatgtctataaatggtgttaaaccaaatatgataacttacaatatacagatggattatctttgcaagagcggaagatgcacggaagctaggaagatctttgattctatggtcagtttgggccaaaaaccgtctgttactacctacagtattctgcttcatggttatgttatggaaaaatcatttcatgatatgcattgtctccttgatttgatggtagaaaatggtatctcaccagatcatcatgtctacaacatactcatatctgcatatgctaaagaggaaatggcaagtgaggtaatgcatatatttacaaaaatgcggcggcaaggattgaaccctagtgttgcggactatggagcggtaataaacttgctttccagtattggcagaatggatgatgctatgccccaattcaatcaaatgatagccgaagtattagctcctgatatcatagttttcaacccccttattagtggtttttgtacttgtggcaaatgggagaaggttcatgaactattttctgaaatgttgaatcgcggcacctatcctgataccgtgttcttcaccacaattatggaccgcctttgcaaaaatggaagggttatggaagcccaagatatgtttgacctgatggtacacgtgggtgttaagcctaatgttcatacttatgccacattgatgcatgggtactttttcgttaggaagatggatgaagtgaggaagttacttggcaatatgctctcaattggctcgaaaccggat

SEQ ID NO: 2169 - DNA, 1779 bp, Triticum aestivum
  source 1..1779: mol_type = genomic DNA
atggtgagcatcggtgagcatgctcgtcctcctaactctgctttccttcttcctaatcccagttcatgcccaggttgcgccggtgcggtggggggcgagcggcgccggcgtcctctgggtcctctgccattaccagattcttccagatccataggtggagctatgagccgccgcgccgtccccgctggcaggcgcatcttggagcagaacatcaaggcccggtaccgggctggagccattggcaccgacgatgcactccacctgtttgacgaattgctccaggttgcctggccctcctcgatcgccgccatcaactgcctcctcattgtcgtcggccgtgattgccctgcgctcgccgtctccctcttcaaccacatcgcaagagccaaggtggcgccccacaatatcacctacggcattctagtcgactgctgcagccgagctggccgcttggaccttggcttcgcggccatgggccacattgttaagacgggatttgcggtaggatccattgtctctttcagccacctgctcagggccgtctgtgcgaagaagaagaccagctacggaatggacatcgtgctccgaattatgcctgagcttaactgcataccggatgtttactcctacagcattcttttcaagggcctctgcaacgagaagagaagccaagaggctctcgagctgattcacgtgatggttgagcacggaggtagctgccaacctaatctggtctcatacaacaccgtaattgatggcttgttgaaagagggtgaggtgggcaaggcttacatcctattttgtgaaatggtacagagcgggattttggcaaatattgtgacctacaactcaatcatctctggcatgtgcaaggttcatgcaatggacaaggctgagaaggttcttcaacagatgtttgatagagaaattctgccagatactgccacatatactagcctaatacatggatattattcatcaggacaatgcaaagaggtggaacgggttttcgagcacatgtctataaatggtgttcaaccaaatatgataacttacaatatacagatggattatctttgcaagagcggaagatgcgcggaagctaggaagatctttgattctatggtcagtttgggccaaaaaccgtctgttactacctacagtattctgcttcatggttatgttatggaaaaatcatttcatgatatgcattgtctccttgatttgatggtagaaaatggtatctcaccagatcatcatgtctacaacatactcatatctgcatatgctaaagaggaaatggcaagtgaggtaatgcatatatttacaaaaatgcggcagcaaggattgaaccctagtgttgcggactatggagcggtaataaacttgctttccagtattggcagaatggatgatgctatgtcccaattcaatcaaatgatagccgaaggattagctcctaatatcatagttttcaacccccttattagtggtttttgtacttgtggcaaatgggagaaggttcatgaactattttctgaaatgttgaatcgcggcacctatcctgataccgtgttcttcaccacaattatggaccgcctttgcaaaaatggaagggttatggaagcccaagatatgtttgacctgatggtacacatgggtgttaagcctaatgttcatacttatgccacattgatgcatcggtactttttcgttaggaagatggatgaagtgaggaagttacttggcaatatgctctcaattggctcgaaaccggat

SEQ ID NO: 2170 - DNA, 1779 bp, Triticum aestivum
  source 1..1779: mol_type = genomic DNA
atggtgagcatcggtgagcatgctcgtcctcctaactctgctttccttcttcctaatcccagttcatgcccaggttgcgccggtgcggtggggggcgagcggcgccggcgtcctctgggtcctttgccattaccagattcttccagatccataggtggagctatgagccgccgcgccgtccccgctggcaggcgcatcttggagcagaacatcaaggcccggtaccgggctggagccattggcaccgacgatgcactccacctgtttgacgaattgctccaggttgcctggccctcctcgatcgccgccatcaactgcctcctcattggcgtcggccgtgattgccctgcgctcgccgtctccctcttcaaccacatcgcaagagccaaggtggcgccccacaatatcacctacggcattctagtcgactgctgcagccgtgctggccgcttggaccttggcttcgctgccatgggccacatcgttaagacgggatttgcggcaggatccgttgtctctttcagccacctgctcagggccgtctgtgcgaagaagaagaccagctacggaatggacatcgtgctccgaattatgcctgagcttaactgcataccggatgtttactcctacggcattcttttcaagggcctctgcaacgagaagagaagccaagaggctctcgagctgattcacgtgatggttgagcacggaggtagctgccaacctaatctggtctcatacaacaccgtaattgatggcttgttgaaagagggtgaggtgggcaaggcttacatcctattttgtgaaatggtacagagcgggattttggcaaatcttgtgacctacaactcaatcatctctggcatgtgcaaggttcatgcaatggacaaggctgagaaggttcttcaacagatgtttgatagagaaattctgccagatactgccacatatactagcctaatacatggatattattcatcaggacaatgcaaagaggtggaacgggttttcgagcacatgtctataaatggtgttcaaccaaatatgataacttacaatatacagatggattatctttgcaagagcggaagatgcgcggaagctaggaagatctttgattctatggtcagtttgggccaaaaaccgtctgttactacctacagtattctgcttcatggttatgttatggaaaaatcatttcatgatatgcattgtctccttgatttgatggtagaaaatggtatctcaccagatcatcatgtctacaagatactcatatctgcatatgctaaagaggaaatggcaagtgaggtaatgcatatatttacaaaaatgcggcagcaaggattgaaccctagtgttgcggactatggagcggtaataaacttgctttccagtattggcagaatggatgatgctatgtcccaattcaatcaaatgatagccgaaggattagctcctgatatcatagttttcaacccccttattagtggtttttgtacttgtggcaaatgggagaaggttcatgaactattttctgaaatgttgaatcgcggcacctatcctgataccgtgttcttcaccacaattatggaccgcctttgcaaaaatggaagggttatggaagcccaagataagtttgacctgatggtacacatgggtgttaagcctaatgttcatacttatgccacattgatgcatcggtactttttcgttatgaagatggatgaagtgaggaagttacttggcaatatgctctcaattggctcgaaaccggat

SEQ ID NO: 2171 - DNA, 1779 bp, Triticum aestivum
  source 1..1779: mol_type = genomic DNA
atggtgagcatcggcgagcatgctcgtcctcctaactctgctttccttcttcctaatcccagttcatgcccaggttgcgccggtgcggtggggggcgagcggcgccggcgtcctctgggtcctctgccactaccagattcttccagatccataggtggagctatgagccgccgcgccgtccccgctggcaggcgcatcttggagcagaacatcaaggcccggtaccgggctggagccattggcaccgacgatgcactccacctgtttgacgaattgctccaggttgcctggccctcctcgatcgccgccatcaactgcctcctcattgtcgtcggccgtgattgccctgcgctcgccgtctccctcttcaaccacatcgcaagagccaaggtggcgccccacaatatcacctacggcattctagtcgactgctgcagccgtgctggccgcttggaccttggcttcgctgccatgggccacatcgttaagacgggatttgcggcaggatccgttgtctctttcagccacctgctcagggccgtctgtgcggagaagaagaccagctacggaatggacatcgtgctccgaattatgcctgagcttaactgcataccggatgtttactcctacagcattcttttcaagggcctctgcaacgagaagagaagccaagaggttctcgagctgattcacgtgatggttgagcacggaggtagctgccaacctaatctggtctcatacaacaccgtaattgatggcttgttgaaagagggtgaggtgggcaaggcttacagcctattttgtgaaatggtacagagcgggattttggcaaatattgtgacctacaactcaatcatctctggcatgtgcaaggttcatgcaatggacaaggctgagaaggttcttcaacagatgtttgatagagaaattctgccagatactgccacatatactagcctaatacatggatgttattcatcaggacaatgcaaagaggtggaacgggttttcgagcacatgtctataaatggtgttcaaccaaatatgataacttacaatgtacagatggattatctttgcaagagcggaagatgcgcggaagctaggaagatctttgattctatggtcagtttgggccaaaaaccgtctgttactacctacagtattctgcttcatggttatgttatggaaaaatcatttcatgatatgcattgtctccttgatttgatggtagaaaatggtatctcaccagatcatcatgtctacaacatactcatatctgcatatgctaaagaggaaatggcaagtgaggtaatgcatatatttacaaaaatgcggcagcaaggattgaaccctagtgttgcggactatggagcggtaataaacttgctttccagtattggcagaatggatgatgctatgtcccaattcaatcaaatgatagccgaaggattagctcctgatatcatagttttcaacccccttattagtggtttttgtacttgtggcaaatgggagaaggttcatgaactattttctgaaatgttgaatcgcggcacctatcctgataccgtgttcttcaccacaattatggaccgcctttgcaaaaatggaagggttatggaagcccaagatatgtttgacctgatggtacacgtgggtgttaagcctaatgttcatacttatgccacattgatgcatgggtactttttcgttaggaagatggatgaagtgaggaagttacttggcaatatgctctcaattggctcgaaaccggat

SEQ ID NO: 2172 - DNA, 1779 bp, Triticum aestivum; identical to SEQ ID NO: 2165
  source 1..1779: mol_type = genomic DNA

SEQ ID NO: 2173 - DNA, 573 bp, Triticum aestivum
  source 1..573: mol_type = genomic DNA
atgcattgtctccttgatttgatggtagaaaatggtatctccccagatcatcatgtctacaacatactcatatctgcatatgctaaagaggaaatggcaagtgaggtaatgcatatatttacaaaaatacggcagcaaggattgaaccctagtgttgcggactatggagcggtaataaacttgctttccagtattggcagaatggatgatgctatgtcccaattcaatcaaatgatagccgaaggattagctcctgatatcatagttttcaacccccttattagtggtttttgtacttgtggcaaatgggagaaggttcatgaactattttctgaaatgttgaatcgcggcacctatcctgataccgtgttcttcaccacaattatggaccgcctttgcaaaaatggaagggttatggaagcccaagatatgtttgacctgatggtacacgtgggtgttaagcctaatgttcatacttatgccacattgatgcatgggtactttttcgttaggaagatggatgaagtgaggaagttacttggcaatatgctctcaattggctcgaaaccggat

SEQ ID NO: 2174 - DNA, 735 bp, Triticum aestivum
  source 1..735: mol_type = genomic DNA
atgataacttacaatatacagatggattatctttgcaagagcggaagatgcgcggaagctaggaagatctttgattctatggtcagtttgggccaaaaaccgtytgttactacctacagtattctgcttcatggttatgttatggaaaaatcatttcatgatatgcattgtctccttgatttgatggtagaaaatggtatctcaccagatcatcatgtctacaacatactcatatctgcatatgctaaagaggaaatggcaagtgaggtaatgcatatatttacaaaaatgcggcagcaaggattgaaccctagtgttgcggactatggagcggtaataaacttgcattccagtattggcagaatggatgatgctatgccccaattcaatcaaatgatagccgaaggattagctcctgatatcatagttttcaacccccttattagtggtttttgtacttgtggcaaatgggagaaggttcatgaactattttctgaaatgttgaatcgcggcacctatcctgataccgtgttcttcaccacaattatggaccgcctttgcaaaaatggaagggttatggaagcccaagatatgtttgacctgatggtacacgtgggtgttaagcctaatgttcatacttatgccacattgatgcatgggtactttttcgttaggaagatggatgaagtgaggaagttacttggcaatatgctctcaattggctcgaaaccggat

SEQ ID NO: 2175 - DNA, 1779 bp, Triticum aestivum
  source 1..1779: mol_type = genomic DNA
atggtgagcatcggtgagcatgctcgtcctcctaactctgctttccttcttcctaatcccagttcatgcccaggttgcgccggtgcggtggggggcgagcggcgccggcgtcctctgggtcctctgccattaccagattcttccagatccataggtggagctatgagccgccgcgccgtccccgctggcaggcgcatcttggagcagaacatcaaggcccggtaccgggctggagccattggcaccgacgatgcactccacctgtttgacgaattgctccaggttgcctggccctcctcgatcgccgccatcaactgcctcctcattgtcgtcggccgtgattgccctgcgctcgccgtctccctcttcaaccacatcgcaagagccaaggtggcgccccacaatatcacctacggcattctagtcgactgctgcagccgagctggccgcttggaccttggcttcgcggccatgggccacattgttaagacgggatttgcggtaggatccattgtctctttcagccacctgctcagggccgtctgtgcgaagaagaagaccagctacggaatggacatcgtgctccgaattatgcctgagcttaactgcataccggatgtttactcctacagcattcttttcaagggcctctgcaacgagaagagaagccaagaggctctcgagctgattcacgtgatggttgagcacggaggtagctgccaacctaatctggtctcatacaacaccgtaattgatggcttgttgaaagagggtgaggtgggcaaggcttacatcctattttgtgaaatggtacagagcgggattttggcaaatattgtgacctacaactcaatcatctctggcatgtgcaaggttcatgcaatggacaaggctgagaaggttcttcaacagatgtttgatagagaaattctgccagatactgccacatatactagcctaatacatggatattattcatcaggacaatgcaaagaggtggaacgggttttcgagcacatgtctataaatggtgttcaaccaaatatgataacttacaatatacagatggattatctttgcaagagcggaagatgcgcggaagctaggaagatctttgattctatggtcagtttgggccaaaaaccgtctgttactacctacagtattctgcttcatggttatgttatggaaaaatcatttcatgatatgcattgtctccttgatttgatggtagaaaatggtatctcaccagatcatcatgtctacaacatactcatatctgcatatgctaaagaggaaatggcaagtgaggtaatgcatatatttacaaaaatgcggcagcaaggattgaaccctagtgttgcggactatggagcggtaataaacttgctttccagtattggcagaatggatgatgctatgtcccaattcaatcaaatgatagccgaaggattagctcctgatatcatagttttcaacccccttattagtggtttttgtacttgtggcaaatgggagaaggttcatgaactattttctgaaatgttgaatcgcggcacctatcctgataccgtgttcttcaccacaattatggaccgcctttgcaaaaatggaagggttatggaagcccaagatatgtttgacctgatggtacacgtgggtgttaagcctaatgttcatacttatgccacattgatgcatgggtactttttcgttaggaagatggatgaagtgaggaagttacttggcaatatgctctcaattggctcgaaaccggat

SEQ ID NO: 2176 - DNA, 1344 bp, Triticum aestivum
  misc_feature 1306: note = n is a, c, g, or t
  source 1..1344: mol_type = genomic DNA
atgggccacatcgttaagacgggatttgcggcaggatccgttgtctctttcagccacctgctcagggccgtctgtgcggagaagaagaccagctacggaatggacatcgtgctccgaattatgcctgagcttaactgcataccggatgtttactcctacagcattcttttcaagggcctctgcaacgagaagagaagccaagaggttctcgagctgattcacgtgatggttgagcacggaggtagctgccaacctaatctggtctcatacaacaccgtaattgatggcttgttgaaagagggtgaggtgggcaaggcttacagcctattttgtgaaatggtacagagcgggattttggcaaatattgtgacctacaactcaatcatctctggcatgtgcaaggttcatgcaatggacaaggctgagaaggttcttcaacagatgtttgatagagaaattctgccagatactgccacatatactagcctaatacatggatgttattcatcaggacaatgcaaagaggtggaacgggttttcgagcacatgtctataaatggtgttcaaccaaatatgataacttacaatgtacagatggattatctttgcaagagcggaagatgcgcggaagctaggaagatctttgattctatggtcagtttgggccaaaaaccgtctgttactacctacagtattctgcttcatggttatgttatggaaaaatcatttcatgatatgcattgtctccttgatttgatggtagaaaatggtatctcaccagatcatcatgtctacaacatactcatatctgcatatgctaaagaggaaatggcaagtgaggtaatgcatatatttacaaaaatgcggcagcaaggattgaaccctagtgttgcggactatggagcggtaataaacttgctttccagtattggcagaatggatgatgctatgtcccaattcaatcaaatgatagccgaaggattagctcctgatatcatagttttcaacccccttattagtggtttttgtacttgtggcaaatgggagaaggttcatgaactattttctgaaatgttgaatcgcggcacctatcctgataccgtgttcttcaccacaattatggaccgcctttgcaaaaatggaagggttatggaagcccaagatatgtttgacctgatggtacacgtgggtgttaagcctaatgttcatacttatgccacattgatgcatgggtactttttcgttaggaagatggatgaagtgaggaagttacttggcaatrtgctctcaattggctcgaaaccgngattaggagtgctctgcttcaaggttagtgccaggcca

SEQ ID NO: 2177 - DNA, 1779 bp, Triticum aestivum
  source 1..1779: mol_type = genomic DNA
atggtgagcatcggcgagcatgctcgtcctcctaactctgctttccttcttcctaatcccagttcatgcccaggttgcgccggtgcggtggggggcgagcggcgccggcgtcctctgggtcctctgccactaccagattcttccagatccataggtggagctatgagccgccgcgccgtccccgctggcaggcgcatcttggagcagaacatcaaggcccggtaccgggctggagccattggcaccgacgatgcactccacctgtttgacgaattgctccaggttgcctggccctcctcgatcgccgccatcaactgcctcctcattgtcgtcggccgtgattgccctgcgctcgccgtctccctcttcaaccacatcgcaagagccaaggtggcgccccacaatatcacctacggcattctagtcgactgctgcagccgtgctggccgcttggaccttggcttcgctgccatgggccacatcgttaagacgggatttgcggcaggatccgttgtctctttcagccacctgctcagggccgtctgtgcggagaagaagaccagctacggaatggacatcgtgctccgaattatgcctgagcttaactgcataccggatgtttactcctacagcattcttttcaagggcctctgcaacgagaagagaagccaagaggttctcgagctgattcacgtgatggttgagcacggaggtagctgccaacctaatctggtctcatacaacaccgtaattgatggcttgttgaaagagggtgaggtgggcaaggcttacagcctattttgtgaaatggtacagagcgggattttggcaaatattgtgacctacaactcaatcatctctggcatgtgcaaggttcatgcaatggacaaggctgagaaggttcttcaacagatgtttgatagagaaattctgccagatactgccacatatactagcctaatacatggatgttattcatcaggacaatgcaaagaggtggaacgggttttcgagcacatgtctataaatggtgttcaaccaaatatgataacttacaatgtacagatggattatctttgcaagagcggaagatgcgcggaagctaggaagatctttgattctatggtcagtttgggccaaaaaccgtctgttactacctacagtattctgcttcatggttatgttatggaaaaatcatttcatgatatgcattgtctccttgatttgatggtagaaaatggtatctcaccagatcatcatgtctacaacatactcatatctgcatatgctaaagaggaaatggcaagtgaggtaatgcatatatttacaaaaatgcggcagcaaggattgaaccctagtgttgcggactatggagcggtaataaacttgatttccagtattggcagaatggatgatgctatgtcccaattcaatcaaatgatagccgaaggattagctcctgatatcatagttttcaacccccttattagtggtttttgtacttgtggcaaatgggagaaggttcatgaactattttctgaaatgttgaatcgcggcacctatcctgataccgtgttcttcaccacaattatggaccgcctttgcaaaaatggaagggttatggaagcccaagatatgtttgacctgatggtacacgtgggtgttaagcctaatgttcatacttatgccacattgatgcatgggtactttttcgttaggaagatggatgaagtgaggaagttacttggcaatatgctctcaattggctcgaaaccggat

SEQ ID NO: 2178 - DNA, 762 bp, Triticum aestivum
  source 1..762: mol_type = genomic DNA
atgtctataaatggtgttcaaccaaatatgataacttacaatatacagatggattatctttgcaagagcggaagatgcgcggaagctaggaagatctttgattctatggtcagtttgggccaaaaaccgtctgttactacctacagtattctgcttcatggttatgttatggaaaaatcatttcatgatatgcattgtctccttgatttgatggtagaaaatggtatctcaccagatcatcatgtctacaacatactcatatctgcatatgctaaagaggaaatggcaagtgaggtaatgcatatatttacaaaaatgtggcagcaaggattgaaccctagtgttgcggactatggagcggtaataaacttgctttccagtattggcagaatggatgatgctatgtcccaattcaatcaaatgatagccgaaggattagctcctgatatcatagttttcaacccccttattagtggtttttgtacttgtggcaaatgggagaaggttcatgaactattttctgaaatgttgaatcgcggcacctatcctgataccgtgttcttcaccacaattatggaccgcctttgcaaaaatggaagggttatggaagcccaagatatgtttgacctgatggtacacgtgggtgttaagcctaatgttcatacttatgccacattgatgcatgggtactttttcgttaggaagatggatgaagtgaggaagttacttggcaatatgctctcaattggctcgaaaccggat

SEQ ID NO: 2179 - DNA, 1779 bp, Triticum aestivum
  source 1..1779: mol_type = genomic DNA
atggtgagcatcggcgagcatgctcgtcctcctaactctgctttccttcttcctaatcccagttcatgcccaggttgcgccagtgcggtggggggcgagcggcgccggcgtcctctgggtcctctgccattaccagattcttccagatccataggtggatctatgagccgccgcgccgtccccgctggcaggcgcatcttggagcagaacatcaaggcccggtaccgggctggagccattggcaccgacgatgcacaccacctgtttgacgaattgctccaggttgcctggccctcctcaatcgccaccatcaactgcctcctcattgtcgtcggccgtgattgccctgcgctcgccatctccctcttcaaccacatcgcaagagccaaggtggcgccccacaatatcacctatggcattctagtcgactgctgcagccgtgctggccgcttggaccttggcttcactgccatgggccacattgttaagacgggatttgcggcaggatccgttgtctctttcagccacctgctcagggccgtctgtgcggagaagaagaccagctacggaatggacatcgtgctccgaattatgcctgagcttaactgcataccggatgtttactcctacagcactcttttcaagggcctctgcaacgagaagagaagccaagaggctctcgagctgattcacgtgatggttgagcacggaggtagctgccaacctaatctggtctcatacaacaccgtaattgatggcttgttgaaagagggtgaggtgggcaaggcttacagcctattttgtgaaatggtacagagcgggattttggcaaatattgtgacctacaactcaatcatctttgacatgtgcaaggttcatgcaatggacaaggctgagaaggttcttcaacagatgtttgatagagaaattctgccagatactgccacatatactagcctaatacatggatattattcatcaggacaatgcaaagaggtggaacgggttttcgagcacatgtctataaatggtgttcaaccaaatatgataacttacaatatacagatggattatctttgcaagagcggaagatgcgcggaagctaggaagatctttgattctatggtcagtttgggccaaaaaccgtctgttactacctacagtattctgcttcatggttatgttatggaaaaatcatttcatgatatgcattgtctccttgatttgatggtagaaaatggtatctcaccagatcatcatgtctacaacatactcatatctgcatatgctaaagaggaaatggcaagtgaggtaatgcatatatttacaaaaatgcggcagcaaggattgaaccctagtgttgcggactatggagcggtaataaacttgctttccagtattggcagaatggatgatgctatgtcccaattcaatcaaatgatagccgaaggattagctcctgatatcatagttttcaacccccttattagtggtttttgtacttgtggcaaatgggagaaggttcatgaactattttctgaaatgttgaatcgcggcacctatcctgataccgtgttcttcaccacaattatggaccgcctttgcaaaaatggaagggttatggaagcccaagatatgtttgacctgatggtacacgtgggtgttaagcctaatgttcatacttatgccacattgatgcatgggtactttttcgttaggaagatggatgaagtgaggaagttacttggcaatatgctctcaattggctcgaaaccggat

SEQ ID NO: 2180 - DNA, 1779 bp, Triticum aestivum
  source 1..1779: mol_type = genomic DNA
atggtgagcatcggcgagcatgctcgtcctcctaactctgctttccttctacctaatcccagttcatgcccaggttgcgccggtgcggtggggggcgagcggcgccggcgtcctctgggtcctctgccattaccagattcttccagatccataggtggagctatgagccgccgcgccgtccccgctggcaggcgcatcttggagcagaacatcaaggcccggtaccgggctggagccattggcaccgacgatgcactccacctgtttgacgaattgctccaggttgcctggccctcctcaatcgccgccatcaactgcctcctcattgtcgtcggccgtgattgccctgcgctcgtcgtctccctcttcaaccacatcgcaagagccaaggtggcgccccacaatatcacctacgtcattctagtcgactgctgcagccgtgctggccgcttggaccttggcttcgctgccatgggccacattgttaagacgggatttgcggcaggatctgttgtctctttcagccacctgctcagggccgtctgtgcggagaagaagaccagctacggaatggacatcgtgctccgaattatgcctgagcttaactgcataccggatgtttactcctacagcattcttttcaagggcctctgcaacgagaagagaagccaagaggctctcgagctgattcacgtgatggttgagcacggaggtagctgccaacctaatctggtctcatataacaccgtaattgatggcttgttgaaagagggtgaggtgggcaaggcttacagcctattttgtgaaatggtacagagcgggattttggcaaatattgtgacctacaactcaatcatctttggcatgtgcaaggttcatgcaatggacaaggctgagaaggttcttcaacagatgtttgatagagaaattctgccagatactgccacatatactagcctaatacatggatattattcatcaggacaatgcaaagaggtggaacgggttttcgagcacatgtctataaatggtgttcaaccaaatatgataacttacaatatacagatggattatctttgcaagagcggaagatgcgcggaagctaggaagatctttgattctatggtcagtttgggccaaaaaccgtctgttactacctacagtattctgcttcatggttatgttatggaaaaatcatttcatgatatgcattgtctccttgatttgatggtagaaaatggtatctcaccagatcatcatgtctacaacatactcatatctgcatatgctaaagaggaaatggcaagtgaggtaatgcatatatttacaaaaatgtggcagcaaggattgaaccctagtgttgcggactatggagcggtaataaacttgctttccagtattggcagaatggatgatgctatgtcccaattcaatcaaatgatagccgaaggattagctcctgatatcatagttttcaacccccttattagtggtttttgtacttgtggcaaatgggagaaggttcatgaactattttctgaaatgttgaatcgcggcacctatcctgataccgtgttcttcaccacaattatggaccgcctttgcaaaaatggaagggttatggaagcccaagatatgtttgacctgatggtacacgtgggtgttaagcctaatgttcatacttatgccacattgatgcatgggtactttttcgttaggaagatggatgaagtgaggaagttacttggcaatatgctctcaattggctcgaaaccggat

SEQ ID NO: 2181 - DNA, 1779 bp, Triticum aestivum; identical to SEQ ID NO: 2168
  source 1..1779: mol_type = genomic DNA

SEQ ID NO: 2182 - DNA, 1779 bp, Triticum aestivum
  source 1..1779: mol_type = genomic DNA
atggtgagcatcggcgagcatgctcgtcctcctaactctgctttccttcttcctaatcccagttcatgcccaggttgcgtcggtgcggtggggggcgagcggcatcggcgtcctctgggtcctctgccattaccagattcttccagatccataggtggagctatgagccgccgcgccgtccccgctggcaggcgcatcttggagcagaacatcaaggcccggtaccgggctggagccattggcaccgacgatgcactccacctatttgacgaattgctccaggttgcctggccctcctcgatcgccgccatcaactgcctcctcattgtcgtcggccgtgattgccctgcgctcgccgtctccctcttcaaccacatcgcaagagccaaggtggcgccccacaatatcacctacggcattctagtcgactgctgcagccatgctggccgcttggaccttggcttcgctgccatgggccacatcgttaagacggtatttgcgacaggatccattgtctctttcagccacctgctcagggccgtctgtgcggagaagaagaccagctacggaatggacatcgtgctccgaattatgcctgagcttaactgcataccggatgtttactcctacagcatgcttttcaagggcctctgcaacgagaagagaagccaagaggctctcgagctgattcacgtgatggttgagcacggaggtagctgccaacctaatctggtctcatacaacgccataattgatggcttgttgaaagagggtgaggtgggcaaggcttacagcctattttgtgaaatggtacagagcgggattttggcaaatattgtgacctacaactcaatcatctctggcatgtgcaaggttcatgcaatggacaaggctgagaaggttcttcaacagatgtttgatagagaaattctgccagatactgccacatatactagcctaatacatggatgttattcatcaggacaatgcaaagaggtggaacgggttttcgagcacatgtctataaatggtgttcaaccaaatatgataacttacaatatacagatggattatctttgcaagagcggaagatgcacggaagctaggaagatctttgattctatggtcagtttgggccaaaaaccgtctgttactacctacagtattctgcttcatggttatgttatggaaaaatcatttcatgatatgcattgtctccttgatttgatggtagaaaatggtatctcaccagatcatcatgtctacaacatactcatatctgcatatgctaaagaggaaatggcaagtgaggtaatgcatatatttacaaaaatgcggcggcaaggattgaaccctagtgttgcggactatggagcggtaataaacttgctttccagtattggcagaatggatgatgctatgccccaattcaatcaaatgatagccgaagtattagctcctgatatcatagttttcaacccccttattagtggtttttgtacttgtggcaaatgggagaaggttcatgaactattttctgaaatgttgaatcgcggcacctatcctgataccgtgttcttcaccacaattatggaccgcctttgcaaaaatggaagggttatggaagcccaagatatgtttgacctgatggtacacgtgggtgttaagcctaatgttcatacttatgccacattgatgcatgggtactttttcgttaggaagatggatgaagtgaggaagttacttggcaatatgctctcaattggctcgaaaccggat

SEQ ID NO: 2183 - DNA, 1779 bp, Triticum aestivum; identical to SEQ ID NO: 2160
  source 1..1779: mol_type = genomic DNA

SEQ ID NO: 2184 - DNA, 1779 bp, Triticum aestivum
  source 1..1779: mol_type = genomic DNA
atggtgagcatcggcgagcatgctcgtcctcctaactctgctttccttcttcctaatcccagttcatgcccaggttgcgtcggtgcggtggggggcgagcggcaccggcgtcctctaggtcctctgccattaccagattcttccagatccataggtggagctatgagccgccgcgccgtccccgctggcaggcgcatcttggagcagaacatcaaggcccggtaccgggctggagccattggcaccgacgatgcactccacctgtttgacgaattgctccaggttgcctggccctcctcgatcgccaccatcaactgcctcctcattgtcgtcggccgtgattgccctgcgctcgccgtctccctcttcaaccacatcgcaagagccaaggtggcgccccacaatatcacctacggcattctagtcgactgctgcagccgtgctggccgcttggaccttggcttcgctgccatgggccacatcgttaagacgggatttgcggcaggatccgttatctctttcagccacctgctcagggccgtctgtgcggagaagaagaccagctacggaatggacatcgtgctccgaattatgcctgagcttaactgcataccggatgtttactcctacagcattcttttcaagggcctctgcaacgagaagagaagccaagaggctctcgagctgattcacgtgatggttgagcacggaggtagctgccaacctaatctggtctcatacaacaccgtaattgatggcttgttgaaagagggtgaggtgggcaaggcttacagcctattttgtgaaatggtacagagcgggattttggcaaatattgtgacctacaactcaatcatctctggcatgtgcaaggttcatgcaatggacaaggctgagaaggttcttcaacagatgtttgatagagaaattctaccagatactgccacatatactagcctaatacatggatattattcatcaggacaatgcaaagaggtggaacgggttttcgagcacatgtctataaatggtgttcaaccaaatatgataacttacaatatacagatggattatctttgcaagagcggaagatgcgcggaagctaggaagatctttgattctatggtcagtttgggccaaaaaccgtctgttactacctacagtattctgcttcatggttatgttatggaaaaatcatttcatgatatgcattgtctccttgattttatggtagaaaatggtatctcaccagatcatcatgtctacaacatactcatatctgcatatgctaaagaggaaatggcaagtgaggtaatgcatatatttacaaaaatgcggcagcaaggattgaaccctagtgttgcggactatggagcggtaataaacttgctttccagtattggcagaatggatgatgctatgtcccaattcaatcaaatgatagccgaaggattagctcctgatatcatagttttcaacccccttattagtggtttttgtacttgtggcaaatgggagaaggttcatgaactattttctgaaatgttgaatcgcggcacctatcatgataccgtgttcttcaccacaattatggaccgcctttgcaaaaatggaagggttatggaatcccaagatatgtttgacctgatggtacacgtgggtgttaagcctaatgttcatacttatgccacattgatgcatgggtactttttcgttaggaagatggatgaagtgaggaagttagttggcaatatgctctcaattggctcgaaaccggat

SEQ ID NO: 2185 - DNA, 1779 bp, Triticum aestivum; identical to SEQ ID NO: 2160
  source 1..1779: mol_type = genomic DNA

SEQ ID NO: 2186 - DNA, 1779 bp, Triticum aestivum
  source 1..1779: mol_type = genomic DNA
atggtgagcatcggcgagcatgctcgtcctcctaactctgctttccttcttcctaatcccagttcatgcccaggttgcgtcggtgcggtggggggcgagcggcaccggcgtcctctaggtcctctgccattaccagattcttccagatccataggtggagctatgagccgccgcgccgtccccgctggcaggcgcatcttggagcagaacatcaaggcccggtaccgggctagagccattggcaccgacgatgcactccacctgtttgacgaattgctccaggttgcctggccctcctcgatcgccgccatcaactgcctcctcattgtcgtcggccgtgattgccctgcgctcgccgtctccctcttcaaccacatcgcaagagccaaggtggcgccccacaatatcacctacggcattctagtcgactgctgcagccgtgctggccgcttggaccttggcttcgctgccatgggccacatcgttaagacgggatttgcggcaggatccgttatctctttcagccacctgctcagggccgtctgtgcggagaagaagaccagctacggaatggacatcgtgctccgaattatgcctgagcttaactgcataccggatgtttactcctacagcattcttttcaagggcctctgcaacgagaagagaagccaagaggctctcgagctgattcacgtgatggttgagcacggaggtagctgccaacctaatctggtctcatacaacaccgtaattgatggcttgttgaaagagggtgaggtgggcaaggcttacagcctattttgtgaaatggtacagagcgggattttggcaaatattgtgacctacaactcaatcatctctggcatgtgcaaggttcatgcaatggacaaggctgagaaggttcttcaacagatgtttgatagagaaattctaccagatactgccacatatactagcctaatacatggatattattcatcaggacaatgcaaagaggtggaacgggttttcgagcacatgtctataaatggtgttcaaccaaatatgataacttacaatatacagatggattatctttgcaagagcggaagatgcgcggaagctaggaagatctttgattctatggtcagtttgggccaaaaaccgtctgttactacctacagtattctgcttcatggttatgttatggaaaaatcatttcatgatatgcattgtctccttgattttatggtagaaaatggtatctcaccagatcatcatgtctacaacatactcatatctgcatatgctaaagaggaaatggcaagtgaggtaatgcatatatttacaaaaatgcggcagcaaggattgaaccctagtgttgcggactatggagcggtaataaacttgctttccagtattggcagaatggatgatgctatgtcccaattcaatcaaatgatagccgaaggattagctcctgatatcatagttttcaacccccttattagtggtttttgtacttgtggcaaatgggagaaggttcatgaactattttctgaaatgttgaatcgcggcacctatcmtgataccgtgttcttcaccacaattatggaccgcctttgcaaaaatggaagggttatggaagcccaagatatgtttgacctgatggtacacgtgggtgttaagcctaatgttcatacttatgccacattgatgcatgggtactttttcgttaggaagatggatgaagtgaggaagttacttggcaatatgctctcaattggctcgaaaccggat

SEQ ID NO: 2187 - DNA, 1551 bp, Triticum aestivum
  source 1..1551: mol_type = genomic DNA
atgcgcccatgccggacgcctctcctcgactccacctcgccgctgtccgtgctcctcctcgaccacctccaccgcaatcgcccctcccctcccccctcagcctcgccgccgtcagccttctggtctcccatcgccgcattcgccgctgccacaaagcgcgcccgagccgggacgctcagccctgaggacgcacaccacctgttcgacgaattgctacgccagtccaacccggtccccaatcgcttcctgaacagcttccttgccgccctcgcccgtgctccaccctccgacgcctgcggagatggccccgccctcaccgtcgccctcttcaaccgcctgtgccgagaagaggccggcccttgtgtagcgccgcccactatctatacctacagcattctaatggacagctgctgccgcgtgggtcgcccggaccttgggcttgctgtcttcggccgcctactcaagtcgggcttcaaggcagaccagagcactgccagcagcctcctcatgtgcctctgcgatgtaggacggacaaacgaggctgtggacgtgctgcttcataggatctccgagctcggctgtgagcctaatgtcatcccatacaacatagttcttaagagcttatgtgacagtagaaggagccagcaagctcttgacctgctccagatgatggcacaaagaggttgctgctcccctaatgtggtgtcatataacaccgtcattcatggcttatttaaggaaggtgaagtaagcatggcgtgctcattattctatgaaatgatgcggcaaagggttatgcctaatgtggtgacatatagatcgatgattggtgcgttgtgcaaggtcggggcaacggacaaggcaaagctggtccttggtcatatggttggtaatggttttcgaccagataagtatatttggaactcattcatggcatctctttgcaagcagggaagaagcaaggaagctgcacaactttttgattacatggtcgccaagggccacaaacctgatgttgtcacgtactctactctgcttcatgggtatgctactgaaggatgcttcactgatatgattaatctctttaattcaatggaaggcaacggtattgtagctaacagctgtgtttttaacatactaattgacgcatatgctaaacgtggaatgatgcatgaagctatgctcatatttactgaaatgcgggaacgaagagtgagtcctgatatattcacctatggaattataatagctgcactttgcagaatgggtaggctatctgatgctatggagaaaataaatgaaatggttgctacaggattacaaccggacaaggctgtttactattccctaattcagggtttttgtacacatgatgatttggtcaaagctaaggagttggtttctgagatgatgaccaaaggtattcctcgtcctaacattgtgttcttcaactcggtaatagccagtctgtgcaaagaaggaagggttaaggatgcacacggtatctttgacttggctctgaacattggtgagaggcccgatttaattcac

SEQ ID NO: 2188 - DNA, 1551 bp, Triticum aestivum; identical to SEQ ID NO: 2187
  source 1..1551: mol_type = genomic DNA

SEQ ID NO: 2189 - DNA, 1551 bp, Triticum aestivum; identical to SEQ ID NO: 2187
  source 1..1551: mol_type = genomic DNA

SEQ ID NO: 2190 - DNA, 1551 bp, Triticum aestivum; identical to SEQ ID NO: 2187
  source 1..1551: mol_type = genomic DNA

SEQ ID NO: 2191 - DNA, 1551 bp, Triticum aestivum; identical to SEQ ID NO: 2187
  source 1..1551: mol_type = genomic DNA

SEQ ID NO: 2192 - DNA, 1551 bp, Triticum aestivum; identical to SEQ ID NO: 2187
  source 1..1551: mol_type = genomic DNA

SEQ ID NO: 2193 - DNA, 1779 bp, Triticum aestivum
  source 1..1779: mol_type = genomic DNA
atggtgagcatcggcgagcatgctcgtcctcctaactctgctttccttcttcctaatcccagttcatgcccaggttgcgccagtgcggtggggggcgagcggcgccggcgtcctctgggtcctctgccattaccagattcttccagatccataggtggatctatgagccgccgcgccgtccccgctggcaggcgcatcttggagcagaacatcaaggcccggtaccgggctggagccattggcaccgacgatgcacaccacctgtttgacgaattgctccaggttgcctggccctcctcaatcgccaccatcaactgcctcctcattgtcgtcggccgtgattgccctgcgctcgccatctccctcttcaaccacatcgcaagagccaaggtggcgccccacaatatcacctatggcattctagtcgactgctgcagccgtgctggccgcttggaccttggcttcactgccatgggccacattgttaagacgggatttgcggcaggatccgttgtctctttcagccacctgctcagggccgtctgtgcggagaagaagaccagctacggaatggacatcgtgctccgaattatgcctgagcttaactgcataccggatgtttactcctacagcactcttttcaagggcctctgcaacgagaagagaagccaagaggctctcgagctgattcacgtgatggttgagcacggaggtagctgccaacctaatctggtctcatacaacaccgtaattgatggcttgttgaaagagggtgaggtgggcaaggcttacagcctattttgtgaaatggtacagagcgggattttggcaaatattgtgacctacaactcaatcatctttgacatgtgcaaggttcatgcaatggacaaggctgagaaggttcttcaacagatgtttgatagagaaattctgccagatactgccacatatactagcctaatacatggatattattcatcaggacaatgcaaagaggtggaacgggttttcgagcacatgtctataaatggtgttcaaccaaatatgataacttacaatatacagatggattatctttgcaagagcggaagatgcgcggaagctaggaagatctttgattctatggtcagtttgggccaaaaaccgtctgttactacctacagtattctgcttcatggttatgttatggaaaaatcatttcatgatatgcattgtctccttgatttgatggtagaaaatggtatctcaccagatcatcatgtctacaacatactcatatctgcatatgctaaagaggaaatggcaagtgaggtaatgcatatatttacaaaaatgcggcagcaaggattgaaccctagtgttgcggactatggagcggtaataaacttgctttccagtattggcagaatggatgatgctatgtcccaattcaatcaaatgatagccgaaggattagctcctaatatcatagttttcaacccccttattagtggtttttgtacttgtggcaaatgggagaaggttcatgaactattttctgaaatgttgaatcgcggcacctatcctgataccgtgttcttcaccacaattatggaccgcctttgcaaaaatggaagggttatggaagcccaagatatgtttgacctgatggtacacatgggtgttaagcctaatgttcatacttatgccacattgatgcatcggtactttttcgttaggaagatggatgaagtgaggaagttacttggcaatatgctctcaattggctcgaaaccggat

SEQ ID NO: 2194 - DNA, 1308 bp, Triticum aestivum
  source 1..1308: mol_type = genomic DNA
atgggccacatcgttaagacgggatttgcggcaggatccgttgtctctttcagccacctgctcagggccgtctgtgcggagaagaagaccagctacggaatggacatcgtgctccgaattatgcctgagcttaactgcataccggatgtttactcctacaacattcttttcaagggcctctgcaacgagaagagaagccaagaggctctcgagctgattcacgtgatggttgagcacggaggtagctgccaacctaatctggtctcatacaacaccgtaattgatggcttgttgaaagagggtgaggtgggcaaggcttacagcctattttgtgaaatggtacagagcgggattttggcaaatattgtgacctacaactcaatcatctctggcatgtgcaaggttcatgcaatggacaaggctgagaaggttcttcaacagatgtttgatagagaaattctgccagatactgccacatatactagcctaatacatggatattattcatcaggacaatgcaaagaggtggaacgggttttcgagcacatgtctataaatggtgttcaaccaaatatgataacttacaatatacagatggattatctttgcaagagcggaagatgcgcggaagctaggaagatctttgattctatggtcagtttgggccaaaaaccgtctgttactacatacagtattctgcttcatggttatgttatggaaaaatcatttcatgatatgcattgtctccttgatttgatggtagaaaatggtatctccccagatcatcatgtctacaacatactcatatctgcatatgctaaagaggaaatggcaagtgaggtaatgcatatatttacaaaaatacggcagcaaggattgaaccctagtgttgcggactatggagcggtaataaacttgctttccagtattggcagaatggatgatgctatgtcccaattcaatcaaatgatagccgaaggattagctcctgatatcatagttttcaacccccttattagtggtttttgtacttgtggcaaatgggagaaggttcatgaactattttctgaaatgttgaatcgcggcacctatcctgataccgtgttcttcaccacaattatggaccgcctttgcaaaaatggaagggttatggaagcccaagatatgtttgacctgatggtacacgtgggtgttaagcctaatgttcatacttatgccacattgatgcatgggtactttttcgttaggaagatggatgaagtgaggaagttacttggcaatatgctctcaattggctcgaaaccggat

SEQ ID NO: 2195 - DNA, 1770 bp, Triticum aestivum
  source 1..1770: mol_type = genomic DNA
atggtgagcatcggcgagcatgctcgtcctcctaactctactttccttcttcctaatcccagttcatgcccaggttgcgccggtgcggtggggggcgagcggcaccggcgtcctctgggtcctctgccattaccagattcttccagatccataggtggagctatgagccgccgcgccgtccccgctggcaggcgcatcttggagcagaacatcaaggcccggtaccgggctggagccattggcaccgacgatgcactccacctgtttgacgaattgctccaggttgcctggccctcctcgatcgccgccatcaactgcctcctcattgtcgtcggccgtgattgccctgcgctcgccgtctccctcttcaaccacatcgcaagagccaaggtggcgccccacaatatcacctacggcattctagtcgactgctgcagccgtgctggccgcttggaccttggcttcgctgccatgggccacatcgttaagacgggatttgcggcaggatccgttgtctcttttagccacctgctcagggccgtctgtgcggagaagaagaccagctacggaatggacatcgtgctccgaattatgcctgagcttaactgcataccggatgtttactcctacagcattcttttcaagggcctctgcaacgagaagagaagccaagaggctctcgagctgattcacgtgatggttgagcacggaggtagctgccaacctaatctggtctcatacaacaccgtaattgatggcttgttgaaagagggtgaggtgggcaaggcttacagcctattttgtgaaatggtacagagcgggattttggcaaatattgtgacctacaactcaatcatctctggcatgtgcaaggttcatgcaatggacaaggctgagaaggttcttcaacagatgtttgatagagaaattctgccagatactgccacatatactagcctaatacatggatattattcatcaggacaatgcaaagaggtggaacgggttttcgagcacatgtctataaatggtgttcaaccaaatatgataacttacaatatacagatggattatctttgcaagagcggaagatgcgcggaagctaggaagatctttgattctatggtcagtttgggccaaaaaccgtttgttactacatacagtattctgcttcatggttatgttatggaaaaatcatttcatgatatgcattgtctccttgatttgatggtagaaaatggtatctcaccagatcatcatgtctacaacatactcatatctgcatatgctaaagaggaaatggcaagtgaggtaatgcatatatttacaaaaatgcggcagcaaggattgaaccctagtgttgcggactatggagcggtaataaacttgctttccagtattggcagaatggatgatgctatgtcccaattcaatcaaatgatagccgaaggattagctcctgatatcatagttttcaacccccttattagtggtttttgtacttgtggcaaatgggagaaggttcatgaactattttctgaaatgttgaatcgcggcacctatcctgataccgtgttcttcaccacaattatggaccgcctttgcaaaaatggaagggttatggaagcccaagatatgtttgacctgatggtacacgtgggtgttaagcctaatgttcatacttatgccacattgatgcatgggtactttttcgttaggaagatggatgaagtgaggaagttacttggcaatawgtcaaagcaacgtttt

SEQ ID NO: 2196 - DNA, 1308 bp, Triticum aestivum
  misc_feature 1289: note = n is a, c, g, or t
  source 1..1308: mol_type = genomic DNA
atgggccacatcgttaagacgggatttgcggcaggatccgttgtctctttcagccacctgctcagggccgtctgtgcggagaagaagaccagctacggaatggacatcgtgctccgaattatgcctgagcttaactgcataccggatgtttactcctacagcattcttttcaagggcctctgcaacgagaagagaagccaagaggctctcgagctgattcacgtgatggttgagcacggaggtagctgccaacctaatctggtctcatacaacaccgtaattgatggcttgttgaaagagggtgaggtgggcaaggcttacagcctattttgtgaaatggtacagagcgggattttggcaaatattgtgacctacaactcaatcatctctggcatgtgcaaggttcatgcaatggacaaggctgagaaggttcttcaacagatgtttgatagagaaattctgccagatactgccacatatactagcctaatacatggatattattcatcaggacaatgcaaagaggtggaacgggttttcgagcacatgtctataaatggtgttcaaccaaatatgataacttacaatatacagatggattatctttgcaagagcggaagatgcgcggaagctaggaagatctttgattctatggtcagtttgggccaaaaaccgtttgttactacatacagtattctgcttcatggttatgttatggaaaaatcatttcatgatatgcattgtctccttgatttgatggtagaaaatggtatctcaccagatcatcatgtctacaacatactcatatctgcatatgctaaagaggaaatggcaagtgaggtaatgcatatatttacaaaaatgcggcagcaaggattgaaccctagtgttgcggactatggagcggtaataaacttgctttccagtattggcagaatggatgatgctatgtcccaattcaatcaaatgatagccgaaggattagctcctgatatcatagttttcaacccccttattagtggtttttgtacttgtggcaaatgggagaaggttcatgaactattttctgaaatgttgaatcgcggcacctatcctgataccgtgttcttcaccacaattatggaccgcctttgcaaaaatggaagggttatggaagcccaagatatgtttgacctgatggtacacgtgggtgttaagcctaatgttcatacttatgccacattgatgcatgggtactttttcgttaggaagatggatgaagtgaggaagttacttggcaatatgctctnaattggctcgaaaccggat

SEQ ID NO: 2197 - DNA, 1308 bp, Triticum aestivum; identical to SEQ ID NO: 2194
  source 1..1308: mol_type = genomic DNA

SEQ ID NO: 2198 - DNA, 1308 bp, Triticum aestivum; identical to SEQ ID NO: 2194
  source 1..1308: mol_type = genomic DNA

SEQ ID NO: 2199 - DNA, 1701 bp, Triticum aestivum
  source 1..1701: mol_type = genomic DNA
atgagccgccgccttgtccccgtcgacagacgcatcttggagcagaacatcaaggctcggtaccacgccggagacattggcacccaggatgcactccacctgtttgacgaattgctccagtgtgctgggtcctcctcgatccgtgccatcaactatctcgttactactgtcggccgtgattgccctgcgctcggcgtctccctcttcaaccgcgtcgcaagtgccaatgtggcaccaaacagtatcacgtacaccatcctcgtcgactgctgctgccgtgctggccgcttggacctcggtttcgctgccatgggccacatcatcaagatgggatttgcagcagatgctatcgtcactttcagccacctactcaatgccatctgtgcggagaagaagaccagctatgcaatggacatcgtactccgaataatgcccatgtttaactgtgttccgaacattttctcctacagcattcttttcaagggtctctgcaacgagaagagaagccaagaggctctcgagctgattcaggtgatggttgagcatggaggtagctgccaacctaatgtggtgtcctatagcaccgtaattgatggcttgttgaaagagggtttggtgggcaaggcttacagtctattctgtgaaatgctacagaggggaatttcgccaaatgctgtgacctgtagttcaatcatctctggcatgtgcaaggctcaatcaatggacaagtctgaggaggttcttcaacagatgcttgatagacgaattctgccagatgttaccacatataatagtctgatacatggatattattcatcaggaaggtgcaaagaagttgatcggattttccaggaaatgtctagaaatggtgttcaaccaaatattgtaacttacaatatacagatggattatctttgcaagagcggaaggtgcgcagaagctaggaaaatatttgattctatgatcggtctgggccaaaaaccagatgttactacctacagtattctgcttcatgggtctgccatggaaaaatcttttcatgagatgcattgtctcattgatttgatggtgggaaatggtatctcaccagatcatcatgtctacaacatactcatgtctgcatatgctaaagaagaaacggttggtgaggtaatgcatatatttacaaaaatgcggcagcaaggactgaaccctaatgtagcaaactatggagcggcagtaaacttgctttccaagattggccgaatggatgatgctatgtcccaattcaatcaaatgataactgaagggttagctcctgatatcatagttttcaccccccttattagtggtttctgttcttgtggcaaatgggagaaggttgatgaactattttctgagatgttggatcgcggcatatgtcccaacacagtgttcttcaacacaattatggaccgcctttgcaaaaatgaaagggttatggaagcccaagatctcttcgacctgatggtacacatgggtgtgaagcctgatgtgtgtacttatagcacactgataggtggatacttgttcgttggtaagatggatgaagtgagcaagttacttgacaatatggtctcaattggcatggaaccagatgttatcacctataacatactgatgcacctcatatacctcatatatatccatcttgtctgttatgtcccatggacatatctcatt

SEQ ID NO: 2200 - DNA, 1701 bp, Triticum aestivum
  source 1..1701: mol_type = genomic DNA
atgagccgccgccttgtccccgtcgacagacgcatcttggagcagaacatcaaggctcggtaccacgccggagacattggcacccaggatgcactccacctgtttgacgaattgctccagtgtgctgggtcctcctcgatccgtgccatcaactatctcgttactactgtcggccgtgattgccctgcgctcggcgtctccctcttcaaccgcgtcgcaagtgccaatgtggcaccaaacagtatcacgtacaccatcctcgtcgactgctgctgccgtgctggccgcttggacctcggtttcgctgccatgggccacatcatcaagatgggatttgcagcagatgctatcgtcactttcagccacctactcaatgccatctgtgcggagaagaagaccagctatgcaatggacatcgtactccgaataatgcccatgtttaactgtgttccgaacattttctcctacagcattcttttcaagggtctctgcaacgagaagagaagccaagaggctctcgagctgattcaggtgatggttgagcatggaggtagctgccaacctaatgtggtgtcctatagcaccgtaattgatggcttgttgaaagagggtttggtgggcaaggcttacagtctattctgtgaaatgctacagaggggaatttcgccaaatgctgtgacctgtagttcaatcatctctggcatgtgcaaggctcaatcaatggacaagtctgaggaggttcttcaacagatgcttgatagacgaattctgccagatgttaccacatataatagtctgatacatggatattattcatcaggaaggtgcaaagaagttgatcggattttccaggaaatgtctagaaatggtgttcaaccaaatattgtaacttacaatatacagatggattatctttgcaagagcggaaggtgcgcagaagctaggaaaatatttgattctatgatcggtctgggccaaaaaccagatgttactacctacagtattctgcttcatgggtctgccatggaaaaatcttttcatgagatgcattgtctcattgatttgatggtgggaaatggtatctcaccagatcatcatgtctacaacatactcatatctgcatatgctaaagaagaaacggttggtgaggtaatgcatatatttacaaaaatgcggcagcaaggactgaaccctaatgtagcaaactatggagcggcagtaaacttgctttccaagattggccgaatggatgatgctatgtcccaattcaatcaaatgataactgaagggttagctcctgatatcatagttttcaccccccttattagtggtttctgttcttgtggcaaatgggagaaggttgatgaactattttctgagatgttggatcgcggcatatgtcccaacacagtgttcttcaacacaattatggaccgcctttgcaaaaatgaaagggttatggaagcccaagatctcttcgacctgatggtacacatgggtgtgaagcctgatgtgtgtacttatagcacactgataggtggatacttgttcgttggtaagatggatgaagtgagcaagttacttgacaatatggtctcaattggcatggaaccagatgttatcacctataacatactgatgcacctcatatacctcatatatatccatcttgtctgttatgtcccatggacatatctcatt

SEQ ID NO: 2201 - DNA, 1701 bp, Triticum aestivum; identical to SEQ ID NO: 2200
  source 1..1701: mol_type = genomic DNA

SEQ ID NO: 2202 - DNA, 1701 bp, Triticum aestivum; identical to SEQ ID NO: 2200
  source 1..1701: mol_type = genomic DNA

SEQ ID NO: 2203 - DNA, 1701 bp, Triticum aestivum; identical to SEQ ID NO: 2199
  source 1..1701: mol_type = genomic DNA

SEQ ID NO: 2204 - DNA, 1701 bp, Triticum aestivum; identical to SEQ ID NO: 2199
  source 1..1701: mol_type = genomic DNA

SEQ ID NO: 2205 - DNA, 1779 bp, Triticum aestivum
  source 1..1779: mol_type = genomic DNA
atgtcgggcctccgtctccgcccccgccgctcgtcatcttctacctttccgatgccccgctcccgcctccgtcactacgcctccgccatgccgatgtccagcctccgtcccctccaccgcagctcctcctccaccacgtcgcctgcacgcgcctggtccccccatgccgccttcgccgcggccacggagcgtgtccgcgccggggcgctcaggccggaagacgcacacaccctgttcgacgaattgcttcggcaggccacaccggtccccgagcgatccctcaacggcttccttgccgccctcgcccgtgcgcccgcctccggaaactgcatcagagatggccccgcccttgcagtggttctcttcaaccgtgtgtgcagagaggaagccggcccgcaggtggcggcgctcacaggctgcacctacagcatcctcatggactgctactgccgcgcccgtcgcccggacctagggcttgccttatttggccgcttcctcagggaaggcctgaagacacaccagatcgtcgccaacaccttcctcaagtgcctctgctatgcgaaattgacggatgaggcagtggacgtgctgcttcataggatgtccgagttcgggtgtgtgcctgatgccatctcatacaacactgtcctgaagagcttatgcgacaatggcatgagccagcgggggctcgaactgctccagatgattgcaaaagaagtaggtgtctgctctctcaatctggtggcatataacacggtcatctacggcttctttaaggaaggtgaaacaggcaaggcatgcaatctattccatgaaatgatgcagcaaggtgttgagcccgatgtggtgacttacaacttgatcattgatgctttgtgcaaggccagagcaatggacaaggcagaagtagtccttcagcagatgatcagtaaaggtgctcaacctgatacagtgacatataattgcatgatcaatggatatgccacatctgggcggttgaaaaaatctgctaaaatgttcagagaaatgaaaagccggggtcttatgccagatattgttacttgcaactccttcctgtcctccctttgcaagcatggaagaagcaaagaagctagagaaatatttgattccatgaccgccaagggccacaaaccggatatcgtctcataccgtattttgcttcatgggtatgccagtgaaggatgctttgctgatatgattgatctctttaattcaatgaaaagcaatggtattgcagctgactgccgtgttttcaccatattaattggtgcctatgctaaacacggaatgatggatgatgcaatgctcatatttacggaaatgcagcaacaaggtctgagtccaaatgtagtgacatattcaactgtcatatcagcactttctagaatgggtaggttggccaatgctatggagaaatttaatcagatgatttccatgggggttcaaccgaacaaagctgtttatcacaccctaattcagggctcttgtatgcatggtgatttgattaaagccaaggagctggtttctgaaatgatgaacaaaggtattcctcatcctagcattacgttcttcggttcaataataaacagtttatgcaaagatggaagggttatggatgcacatgatatctttgacttggttatagacataggtgagaggcctagtgccattacatttaattcactggttgacggatattgcttagttggcaagatggataaagcatttggaatgcttaatgccatggaatcactggta

SEQ ID NO: 2206 - DNA, 1779 bp, Triticum aestivum
  source 1..1779: mol_type = genomic DNA
atgtcgggcctccgtctccgcccccgccgctcgtcatcttctacctttccgatgccccgctcccgcctccgtcactacgcctccgccatgccgatgtccagcctccgtcccctccaccgcagctcctcctccaccacgtcgcctgcacgcgcctggtccccccatgccgccttcgccgcggccacggagcgtgtccgcgccggggcgctcaggccggaagacgcacacaccctgttcgacgaattgcttcggcaggccacaccggtccccgagcgatccctcaacggcttccttgccgccctcgcccgtgcgcccgcctccggaaactgcatcagagatggccccgcccttgcagtggttctcttcaaccgtgtgtgcagagaggaagccggcccgcaggtggcggcgctcacaggctgcacctacagcatcctcatggactgctactgccgcgcccgtcgcccggacctagggcttgccttatttggccgcttcctcagggaaggcctgaagacacaccagatcgtcgccaacaccttcctcaagtgcctctgctatgcgaaattgacggatgaggcagtggacgtgctgcttcataggatgtccgagttcgggtgtgtgcctgatgccatctcatacaacactgtcctgaagagcttatgcgacaatggcatgagccagcgggggctcgaactgctccagatgattgcaaaagaagtaggtgtctgctctctcaatctggtggcatataacacggtcatctacggcttctttaaggaaggtgaaacaggcaaggcatgcaatctattccatgaaatgatgcagcaaggtgttgagcccgatgtggtgacttacaacttgatcattgatgctttgtgcaaggccagagcaatggacaaggcagaagtagtccttcagcagatgatcagtaaaggtgctcaacctgatacagtgacatataattgcatgatcaatggatatgccacatctgggcggttgaaaaaatctgctaaaatgttcagagaaatgaaaagccggggtcttatgccagatattgttacttgcaactccttcctgtcctccctttgcaagcatggaagaagcaaagaagctagagaaatatttgattccatgaccgccaagggccacaaaccggatatcgtctcataccgtattttgcttcatgggtatgccagtgaaggatgctttgctgatatgattgatctctttaattcaatgaaaagcaatggtattgcagctgactgccgtgttttcaccatattaattggtgcctatgctaaacacggaatgatggatgatgcaatgctcatatttacggaaatgcagcaacaaggtctgagtccaaatgtagtgacatattcaactgtaatatcagcactttctagaatgggtaggttggccaatgctatggagaaatttaatcagatgatttccatgggggttcaaccgaacaaagctgtttatcacaccctaattcagggctcttgtatgcatggtgatttgattaaagccaaggagctggtttctgaaatgatgaacaaaggtattcctcatcctagcattacgttcttcggttcaataataaacagtttatgcaaagatggaagggttatggatgcacatgatatctttgacttggttatagacataggtgagaggcctagtgccattacatttaattcactggttgacggatattgcttagttggcaagatggataaagcatttggaatgcttaatgccatggaatcactggta

SEQ ID NO: 2207 - DNA, 1779 bp, Triticum aestivum
  source 1..1779: mol_type = genomic DNA
atgtcgggcctccgtctccgtccccgccgctcgtcatcttctacctttccgatgccccgctcccgcctccgtcactacgcctccgccatgccgatgtccagcctccgtcccctccaccgcagctcctcctccaccacgtcgcctgcatgcgcctggtccccccatgccgccttcgccgcggccacggagcgtgtccgcgccggggcgctcaggccggaagacgcacacaccctgttcgacgaattgcttcggcaggccacaccggtccccgagcgatccctcaacggcttccttgccgccctcgcccgtgcgcccgcctccggaaactgcatcagagatggccccgcccttgcagtggttctcttcaaccgtgtgtgcagagaggaagccggcccgcaggtggcggcgctcacaggctgcacctacagcatcctcatggactgctactgccgcgcccgtcgcccggacctagggcttgccttatttggccgcttcctcagggaaggcctgaagacacaccagatcgtcgccaacaccttcctcaagtgcctctgctatgcgaaattgacggatgaggcagtggacgtgctgcttcataggatgtccgagctcgggtgtgtgcctgatgccatctcatacaacactgtcctgaagagcttatgcgacaatggcatgagccagcgggggctcgaactgctccagatgattgcaaaagaagtaggtgtctgctctctcaatctggtggcatataacacggtcatctacggcttctttaaggaaggtgaaacaggcaaggcatgcaatctattccatgaaatgatgcagcaaggtgttgagcccgatgtggtgacttacaacttgatcattgatgctttgtgcaaggccagagcaatggacaaggcagaagtagtccttcagcagatgatcagtaaaggtgctcaacctcatacagtgacatataattgcatgatcaatggatatgccacatctgggcggttgaaaaagtctgctaaaatgttcagagaaatgaaaagccggggtcttatgccagatattgttacttgcaactccttcctgtcctccctttgcaagcatggaagaagcaaagaagctagagaaatatttgattccatgaccgccaagggccacaaaccggatatcgtctcataccgtattttgcttcatgggtatgccagtgaaggatgctttgctgatatgattgatctctttaattcaatgaaaagcaatggtattgcagctgactgccgtgttttcaccatattaattggtgcctatgctaaacacggaatgatggatgatgcaatgctcatatttacggaaatgcagcaacaaggtctgagtccaaatgtagtgacatattcaactgtaatatcagcactttctagaatgggtaggttggccaatgctatggagaaatttaatcagatgatttccatgggggttcaaccgaacaaagctgtttatcacaccctaattcagggctcttgtatgcatggtgatttgattaaagccaaggagctggtttctgaaatgatgaacaaaggtattcctcgtcctagcattacgttcttcggttcaataataaacagtttatgcaaagatggaagggttatggatgcacatgatatctttgacttggttatagacataggtgagaggcctagtgccattacatttaattcactggttgacggatattgcttagttggcaagatggataaagcatttggaatgcttaatgccatggaatcactggta

SEQ ID NO: 2208 - DNA, 1779 bp, Triticum aestivum; identical to SEQ ID NO: 2206
  source 1..1779: mol_type = genomic DNA

SEQ ID NO: 2209 - DNA, 1779 bp, Triticum aestivum
  source 1..1779: mol_type = genomic DNA
atgtcgggcctccgtctccgtccccgccgctcgtcatcttctacctttccgatgccccgctcccgcctccgtcactacgcctccgccatgccgatgtccagcctccgtcccctccaccgcagctcctcctccaccacgtcgcctgcatgcgcctggtccccccatgccgccttcgccgcggccacggagcgtgtccgcgccggggcgctcaggccggaagacgcacacaccctgttcgacgaattgcttcggcaggccacaccggtccccgagcgatccctcaacggcttccttgccgccctcgcccgtgcgcccgcctccggaaactgcatcagagatggccccgccctcgcagtggttctcttcaaccgtgtgtgcagagaggaagccggcccgcaggtggcggcgctcacaggctgcacctacagcatcctcatggactgctactgccgcgcccgtcgcccggacctagggcttgccttatttggccgcttcctcagggaaggcctgaagacacaccagatcgtcgccaacaccttcctcaagtgcctctgctatgcgaaattgacggatgaggcagtggacgtgctgcttcataggatgtccgagctcgggtgtgtgcctgatgccatctcatacaacactgtcctgaagagcttatgcgacaatggcatgagccagcgggggctcgaactgctccagatgattgcaaaagaagtaggtgtctgctctctcaatctggtggcatataacacggtcatctacggcttctttaaggaaggtgaaacaggcaaggcatgcaatctattccatgaaatgatgcagcaaggtgttgagcccgatgtggtgacttacaacttgatcattgatgctttgtgcaaggccagagcaatggacaaggcagaagtagtccttcagcagatgatcagtaaaggtgctcaacctcatacagtgacatataattgcatgatcaatggatatgccacatctgggcggttgaaaaagtctgctaaaatgttcagagaaatgaaaagccggggtcttatgccagatattgttacttgcaactccttcctgtcctccctttgcaagcatggaagaagcaaagaagctagagaaatatttgattccatgaccgccaagggccacaaaccggatatcgtctcataccgtattttgcttcatgggtatgccagtgaaggatgctttgctgatatgattgatctctttaattcaatgaaaagcaatggtattgcagctgactgccgtgttttcaccatattaattggtgcctatgctaaacacggaatgatggatgatgcaatgctcatatttacggaaatgcagcaacaaggtctgagtccaaatgtagtgacatattcaactgtaatatcagcactttctagaatgggtaggttggccaatgctatggagaaatttaatcagatgatttccatgggggttcaaccgaacaaagctgtttatcacaccctaattcagggctcttgtatgcatggtgatttgattaaagccaaggagctggtttctgaaatgatgaacaaaggtattcctcgtcctagcattacgttcttcggttcaataataaacagtttatgcaaagatggaagggttatggatgcacatgatatctttgacttggttatagacataggtgagaggcctagtgccattacatttaattcactggttgacggatattgcttagttggcaagatggataaagcatttggaatgcttaatgccatggaatcactggta

SEQ ID NO: 2210 - DNA, 1779 bp, Triticum aestivum; identical to SEQ ID NO: 2206
  source 1..1779: mol_type = genomic DNA

SEQ ID NO: 2211 - DNA, 1587 bp, Triticum aestivum
  source 1..1587: mol_type = genomic DNA
atggtgagcatcggcgagcatgctcgtcctcctaactctgctttccttctacctaatcccagttcatgcccaggttgcgccggtgcggtggggggcgagcggcgccggcgtcctctgggtcctctgccattaccagattcttccagatccataggtggagctatgagccgccgcgccgtccccgctggcaggcgcatcttggagcagaacatcaaggcccggtaccgggctggagccattggcaccgacgatgcactccacctgtttgacgaattgctccaggttgcctggccctcctcaatcgccgccatcaactgcctcctcattgtcgtcggccgtgattgccctgcgctcgtcgtctccctcttcaaccacatcgcaagagccaaggtggcgccccacaatatcacctacgtcattctagtcgactgctgcagccgtgctggccgcttggaccttggcttcgctgccatgggccacattgttaagacgggatttgcggcaggatctgttgtctctttcagccacctgctcagggccgtctgtgcggagaagaagaccagctacggaatggacatcgtgctccgaattatgcctgagcttaactgcataccggatgtttactcctacagcattcttttcaagggcctctgcaacgagaagagaagccaagaggctctcgagctgattcacgtgatggttgagcacggaggtagctgccaacctaatctggtctcatataacaccgtaattgatggcttgttgaaagagggtgaggtgggcaaggcttacagcctattttgtgaaatggtacagagcgggattttggcaaatattgtgacctacaactcaatcatctttggcatgtgcaaggttcatgcaatggacaaggctgagaaggttcttcaacagatgtttgatagagaaattctgccagatactgccacatatactagcctaatacatggatattattcatcaggacaatgcaaagaggtggaacgggttttcgagcacatgtctataaatggtgttcaaccaaatatgataacttacaatatacagatggattatctttgcaagagcggaagatgcgcggaagctaggaagatctttgattctatggtcagtttgggccaaaaaccgtctgttactacctacagtattctgcttcatggttatgttatggaaaaatcatttcatgatatgcattgtctccttgatttgatggtagaaaatggtatctcaccagatcatcatgtctacaacatactcatatctgcatatgctaaagaggaaatggcaagtgaggtaatgcatatatttacaaaaatgcggcagcaaggattgaaccctagtgttgcggactatggagcggtaataaacttgctttccagtattggcagaatggatgatgctatgtcccaattcaatcaaatgatagccgaaggattagctcctgatatcatagttttcaacccccttattagtggtttttgtacttgtggcaaatgggagaaggttcatgaactattttctgaaatgttgaatcgcaccagcacaggcataagatcatcgaggcaacgt

SEQ ID NO: 2212 - DNA, 1470 bp, Triticum aestivum
  source 1..1470: mol_type = genomic DNA
atggtgagcatcggtgagcatgctcgtcctcctaactctgctttcattcttcctaatcccagttcatgcccaggttgcgccggtgcggtggggggcgagcggcgccggcgtcctctgggtcctctgccattaccagattcttccagatccataggtggagctatgagccgccgcgccgtccccgctggcaggcgcatcttggagcagaacatcaaggcccggtaccgggctggagccattggcaccgacgatgcactccacctgtttgacgaattgctccaggttgcctggccctcctcgatcgccgccatcaactgcctcctcattgtcgtcggccgtgattgccctgcgcccgccgtctccctcttcaaccacatcgcaagagccaaggtggcgccccacaatatcacctacggcattctagtcgactgctgcagccgtgctggccgcttggaccttggcttcgctgccatgggccacatcgttaagacgggatttgcggcaggatccgttgtctctttcagccacctgctcagggccgtctatgcgaagaagaagaccagctacggaatggacatcgtgctccgaattatgcctgagcttaactgcataccggatgtttactcctacagcattcttttcaagggcctctgcaacgagaagagaagccaagaggctctcgagctgattcacgtgatggttgagcacggaggtagctgccaacctaatctggtctcatacaacaccgtaattgatggcttgttgaaagagggtgaggtgggcaaggcttacagcctattttgtgaaatggtacagagcgggattttggcaaatattgtgacctacaactcaatcatctttggcatgtgcaaggttcatgcaatggacaaggctgagaaggttcttcaacagatgtttgatagagaaattctgccagatactgccacatatactagcctaatacatggatattattcatcaggacaatgcaaagaggtggaacgggttttcgagcacatgtctataaatggtgttcaaccaaatatgataacttacaatatacagatggattatctttgcaagagcggaagatgcgcggaagctaggaagatctttgattctatggtcagtttgggccaaaaaccgtctgttactacctacagtattctgcttcatggttatgttatggaaaaatcatttcatgatatgcattgtctccttgatttgatggtagaraatggtatctcaccagatcatcatgtctacaacatactcatatctgcatatgctaaagaggaaatggcaagtgaggtaatgcatatatttacaaaaatgcggcagcaaggattgaaccctagtgttgcgtatatccgacacacgcaactcgtgtgcctgacgggaagtgctatgtcgacacacggcccgccgaggtgttcttcctgtggtttgagcataactttgagatgtttc

SEQ ID NO: 2213 - DNA, 1755 bp, Triticum aestivum
  misc_feature 1391: note = n is a, c, g, or t
  source 1..1755: mol_type = genomic DNA
atggtgagcatcggcgagcatgctcgtcctcctaactctactttccttcttcctaatcccagttcatgcccaggttgcgccggtgcggtggggggcgagcggcaccggcgtcctctgggtcctctgccattaccagattcttccagatccataggtggagctatgagccgccgcgccgtccccgctggcaggcgcatcttggagcagaacatcaaggcccggtaccgggctggagccattggcaccgacgatgcactccacctgtttgacgaattgctccaggttgcctggccctcctcgatcgccgccatcaactgcctcctcattgtcgtcggccgtgattgccctacgctcgccgtctccctcttcaaccacatcgcaagagccaaggtggcgccccacaatatcacctacggcattctagtcgactgctgcagccgtgctggccgcttggaccttggcttcgctgccatgggccacatcgttaagacgggatttgcggcaggatccgttgtctcttttagccacctgctcagggccgtctgtgcggagaagaagaccagctacggaatggacatcgtgctccgaattatgcctgagcttaactgcataccggatgtttactcctacagcattcttttcaagggcctctgcaacgagaagagaagccaagaggctctcgagctgattcacgtgatggttgagcacggaggtagctgccaacctaatctggtctcatacaacaccgtaattgatggcttgttgaaagagggtgaggtgggcaaggcttacagcctattttgtgaaatggtacagagcgggattttggcaaatattgtgacctacaactcaatcatctctggcatgtgcaaggttcatgcaatggacaaggctgagaaggttcttcaacagatgtttgatagagaaattctrccagatactgccacatatactagcctaatacatggatattattcatcaggacaatgcaaagaggtggaacgggttttcgagcacatgtctataaatggtgttcaaccaaatatgataacttacaatatacagatggattatctttgcaagagcggaagatgcgcggaagctaggaagatctttgattctatggtcagtttgggccaaaaaccgtttgttactacatacagtattctgcttcatggttatgttatggaaaaatcatttcatgatatgcattgtctccttgatttgatggtagaaaatggtatctcaccagatcatcatgtctacaacatactcatatctgcatatgctaaagaggaaatggcaagtgaggtaatgcatatatttacaaaaatgcggcagcaaggattgaaccctagtgttgcggactatggagcggtaataaacttgcnttccagtattggcagaatggatgatgctatgccccaattcaatcaaatgatagccgaaggattagctcctgatatcatagttttcaacccccttattagacgaagcaaccatcatttcactcttctctctcagcttcctctctacccaaccctcgcttctccctcatcttgttcctcatttcttcaagaaaaccctgacctgcttctgccattgttcttctctcccaaagaaggaaaggtgagcgcatcaatggtgttgattctggccaaggcccggtcttgcaaccccgagactgatcctataactccctctcttttcttcttttgggtttgtgattatggtttcttttcttttatttctatt

SEQ ID NO: 2214 - DNA, 1653 bp, Triticum aestivum
  source 1..1653: mol_type = genomic DNA
atggtgagcatcggtgagcatgctcgtcctcctaactctgctttcattcttcctaatcccagttcatgcccaggttgcgccggtgcggtggggggcgagcggcgccggcgtcctctgggtcctctgccattaccagattcttccagatccataggtggagctatgagccgccgcgccgtccccgctggcaggcgcatcttggagcagaacatcaaggcccggtaccgggctggagccattggcaccgacgatgcactccacctgtttgacgaattgctccaggttgcctggccctcctcgatcgccgccatcaactgcctcctcattgtcgtcggccgtgattgccctgcgcccgccgtctccctcttcaaccacatcgcaagagccaaggtggcgccccacaatatcacctacggcattctagtcgactgctgcagccgtgctggccgcttggaccttggcttcgctgccatgggccacatcgttaagacgggatttgcggcaggatccgttgtctctttcagccacctgctcagggccgtctatgcgaagaagaagaccagctacggaatggacatcgtgctccgaattatgcctgagcttaactgcataccggatgtttactcctacagcattcttttcaagggcctctgcaacgagaagagaagccaagaggctctcgagctgattcacgtgatggttgagcacggaggtagctgccaacctaatctggtctcatacaacaccgtaattgatggcttgttgaaagagggtgaggtgggcaaggcttacagcctattttgtgaaatggtacagagcgggattttggcaaatattgtgacctacaactcaatcatctttggcatgtgcaaggttcatgcaatggacaaggctgagaaggttcttcaacagatgtttgatagagaaattctgccagatactgccacatatactagcctaatacatggatattattcatcaggacaatgcaaagaggtggaacgggttttcgagcacatgtctataaatggtgttcaaccaaatatgataacttacaatatacagatggattatctttgcaagagcggaagatgcgcggaagctaggaagatctttgattctatggtcagtttgggccaaaaaccgtctgttactacctacagtattctgcttcatggttatgttatggaaaaatcatttcatgatatgcattgtctccttgatttgatggtagaaaatggtatctcaccagatcatcatgtctacaacatactcatatctgcatatgctaaagaggaaatggcaagtgaggtaatgcatatatttacaaaaatgcggcagcaaggattgaaccctagtgttgcggactatggagcggtaataaacttgctttccagtattggcagaatggatgatgctatgtcccaattcaatcaaatgatagccgaaggattagctcctaatatcatagttttcaacccccttattagtggtttttgtacttgtggcaaatgggagaaggttcatgaactattttctgaaatgttgaatcgcggcacctatcctgataccgtgttcttcaccacaattatggaccgcctttgcaaaaatggaagggttatggaagcccaagatatgtttggcctgatgatc

SEQ ID NO: 2215 - DNA, 1740 bp, Triticum aestivum
  source 1..1740: mol_type = genomic DNA
atggcgcacccgcccagcaaatcgaatcccagtcgcgccgagctccaaatcgaatctgaaattccccaatcccacacctccgtccgccgtcctccctccgctggacgcgcccgtggttggtcctcgccggcgcgggaccgcactcaccatcgcctcaggaagaagcgagcgagacccctctgtccagtgtctcctccgtccgtcctcctcccgccagggcttcaggtcgttgccgccagcattcaccgctgctgcagaaagacggcgacaatgtcacgccttcaggtccgctctttctccagccccgtttcctcacgcgccaacgatctgctgaccgaactccacggccatttgggcttcgggacgctcaggccagagctcgcgcaccaactgttcgacgaaatgctgcgccaacctgtcctagtatcagctcgtgcactcagcggcttatttgctgcacttgcgcgtgcgccgccctcacctgcctgcaccgatggctctgccctcgccattgatctcttcaactgcatggcccgagcaggccgtcgccaggcgacagtacccaccatttacacctacagcatactgattgagtgttgccaccgaacatgccgcccagacctagggcttgccttcttcggccgcctcctcaagacaggcatcccgacggacatcattacctacagcaacctattcaagtgcctctgtgacatgaagcgcacagaggaggctctgaacgtgctgctccataggatgcccgatgacctgcctaatgtcatctcctactcagtaattctcaagagcttctgcgacaatgggaggagccagcttgcgcttgatctgctccagatgatggccaaaaaaggtgctaaccactctcccgacgtgatgtcatacaacatggtaattgatggcttctttaaggagggagaatcaagcaaagcatgtgatctgttccatgaattgatgcagcagggggttgtgcccgatgtggtgatgtgtacctccatcatcaatgcgctatgcaaagcaagagcaatggacaaggcagaggtggttcttcgatcaatggttcataatggtgtccaaccagatgttgtgacatataatagcttgatccaaggatattcaactctgggacagttgaaagaacttgctaggttgttgaaagtgatgagaagccaaggtgttatgccatgcgttgctacctacaactcactcatgacctgcctttgcaagaatggaagattcaaggaagctgtagaaattttttattcgatggctgtgaagggccaaaaacctgatgtcgcctcatactctataatactccatggatacgctaaagaaggatcccttgttgacatgattgatctctgtcagttgatggcagcaaacggagtcatacctgacctccattgtttcaacatactaattgctacatatgctgaatatggaatgacagatgtggctatgcttttcttcgaagagatgttgaagcagggggtgcaccctaatgaagtcacatatttatctgtgatagctgggttatgcaaaacgggcaggatggatgatgctacggaaaaactcggtgagatgattgataggggagtaccacctgacaaaactgtttacatgtgcatgatggagggttattttaaacatggtgattccctgaaagccaaggaatttattaccaaaatgaagaacaaggatattcctcataggtcgcagaagggtaat

SEQ ID NO: 2216 - DNA, 912 bp, Triticum aestivum
  source 1..912: mol_type = genomic DNA
atgcaaagaaggaagggttatgaatgcacaagtatctttgacttggttataggcatgggcgagaggcctaatgtcattacattcagttcactgattgacggatatggcttagtcggccagatgggtaaagcacttggagtgcttgatgccatggtatcagctggcattgagcctaatgttgttacgtatagttcacttcttgatggctattgtaaaaatggaaggatcaatgatgctttgattctgttcagagaaatgccacacaagagaattaaacctaacactgttacatatggcgtcatgctggatgggttgttccgtgctggcagaactgttgctgcaagggaaatgttccatgagatgaccgaaaggggtataccagtgagcatttccatatacaatataatacttggtggtctttgtagaaataattgtgcagacgaagcgatcgcactattccagaaattaggagcaaggaatgtcaagttcgatattataacactcaataccatgattaatgcaatgttcaaggttcggagaagagaagaagctaacgatttgtttgctgcaatatcagccagtgggttggtgcctgatgcttctacttacggtataatgatagaaaatattctaaaggaaggatcagtggaagaagttgacaatatgttttcatcaatggagaagagtggttgtgcacccagctctcgtcttataaattatgtcatcagaatgttgttggaaaaaggtgagattgccagggccgggaattatttatctaaagttgatgggaagatcatctcacttgaagcttcaactacttctttgttgttgtctctcttttcaagggaagggaaataccgggaaaacattgaactgcttcctgcaaagtatcaatttttcaatggatttggt

SEQ ID NO: 2217 - DNA, 912 bp, Triticum aestivum; identical to SEQ ID NO: 2216
  source 1..912: mol_type = genomic DNA

SEQ ID NO: 2218 - DNA, 1707 bp, Triticum aestivum
  source 1..1707: mol_type = genomic DNA
atgatgcaccaaggtgttgagcccagtgtgtggacatatagctcaatcattgatgcattgtgcaaggccagagcaatggacaaggcagagctagtgcttcagcagatggttaacaaaggtgttcaacccaataatgtgacatataattgcatgatccatggatattccacatctgggaggtggaaagaggctgctaaattgtttagagaaatgaaaagccggggccttataccagatacttttacttgcaacgccttaatgacttacctttgtaagcatggaagaagcaaagaagctgcagaattttttgatgccatgactgccaaaggccacagaaatgtcaactcctactgtattttgcttcatgggtatgccaatgaaggatgctttgctgatatgattgatctctttaattcaatggaaagcaatggttttgtagccgactgccatgttttcaccatattaattgatgcatatgctaaacgtggaatgatggatgaagctatgctcatatttactgaaatgcgggaaaaaggagtgagtcccaatgtagtcacctattccactgtaatagccgcactttgcagattgggtaggctgtccgatgctatggacaggttcaatgagatgactgatatgggtgtacagccgaacacagctgtttatcgctccctaattcagggtttttgtatgcttggtgatttggttaaagttaaggaatttgtttctgaaatgatgaacaaaggtattcctcgtcctgacattgcgttcttcacttcagtaataaactctttatgcaaagaaggaagggttatgaatgcacaaggtatctttgacttggttataggcatgggcgagaggcctaatgtcattatattcagttcactgattgacggatatggcttagtcggccagatgggtaaagcacttggagtgcttgatgccatggtatcagctggcattgagcctaatgttgttacgtatagttcactacttgatggctattgtagaaatggaaggatcaatgatgctttgattctgttcagagaaatgccacacaagagaattaaacctgacactgttacatatggcatcatgctggatgggttgttccgtgctggcagaactgttgctgcaagggaaatgttccatgagatgaccgaaaggggtataccagtgagcatttccatatacaatataatacttcgtggtctttgtagaaataattgtgcagacgaagcgatcgcactattccagaaattaggagcaaggaatgtcaagttcgatattataacactcaataccatgattaatgcaatgttcaaggttcggagaagagaagaagctaacgatttgttttctgcaatatcagccagtgggttggtgcctaatgcttctacttacggtataatgatagaaaatattctaaaggaaggatcagtggaagaagttgacaatatgttttcatcaatggagaagagtggttgtgcacccagctctcgtcttataaattatgtcatcagaatgttgttggaaaaaggtgagattgccagggccgggaattatttatctaaagttgatgggaagatcatctcacttgaagcttcaactacttctttgttgttgtctctcttttcaagggaagggaaataccgggaaaacattgaattgcttcctgcaaagtatcaatttttcaatggatttggt

SEQ ID NO: 2219 - DNA, 1707 bp, Triticum aestivum; identical to SEQ ID NO: 2218
  source 1..1707: mol_type = genomic DNA

SEQ ID NO: 2220 - DNA, 912 bp, Triticum aestivum; identical to SEQ ID NO: 2216
  source 1..912: mol_type = genomic DNA

SEQ ID NO: 2221 - DNA, 912 bp, Triticum aestivum; identical to SEQ ID NO: 2216
  source 1..912: mol_type = genomic DNA

SEQ ID NO: 2222 - DNA, 1707 bp, Triticum aestivum; identical to SEQ ID NO: 2218
  source 1..1707: mol_type = genomic DNA

SEQ ID NO: 2223 - DNA, 1338 bp, Triticum aestivum
  source 1..1338: mol_type = genomic DNA
atgctgcgccaacccgtcccggtttcagcacgcgcactcggcggcttattttctgccctcgcgcgtgcgccgccctcaaccgcctgtactgatggccccgccctcgccatcgatctcttcaactgcatgacccgagtaagccgccgccgggtgatagcacctgacatttacacctacaacatactaattgactgctgccacaaagcatgccgcccagacctagggcctgccttcttcggctgcctcctcaagacaggcatcacaatgagcgtcattacctacagcagcttattcaagtgcctctgtgacatgaagcgcacagacgaggctttggacgtgctgctccacaggatgcccgaggacctgcctgatatcatctcctactcagtaattctcaagagcttctgcgacaacggaaggagccagtgtgcgcttgacctgctccggatgatggccaaaaaaggtactgaccattcccccaacgtggtgtcatacaacttggtaatcgatggcttctttaaggaaggtgaaggaagcaaagcatgcgatctgttccatgaaatgatacaacaggggcctgtgcctgatgtggtgacgtatacctccgtcatcgttgcgctatgcaaagcaagagcaatggacaaggcagaggtggtccttcgacaaatggttcatgatggtgttcagccgaatactgtgacatataatagcttgatccaaggatattcaactttgggacagttgaaagaagtcgctaggttgttgaaagtgatgagaagccaaggtgttttgccaagcgctgttacttgcagctcagtcatggactacctttgcaagcatggaagaatcaaagaagctgaggaaatattttattccatggccgtgaatggccgaaaaccagatatagtgtcatactctattatgctccttgggtacgctatggaaggatcccttgttaaaatgattgatctctgtgagctgatggcaagagatggagttgtacctgacctccgttgtttcaacatactgattaatgcatatgctaagtatggcaggatggatgtggccatgcttttctttgaagacatgttgaagcagggtgtgaagcctaatgaattcacttatttaactgtgatatctgtattttgcaagatgggtaggatggatgatgcgatggaaaaattcagtgagatgattgatatgggagtaccacctgacacaaaagtttacatgtgcatggttgagggttatttgaatcttggcgattccatgaaagccaaggaatttattaccaaaatgaagaacatggatattcatcataggccgcggaaaggtaat

SEQ ID NO: 2224 - DNA, 1251 bp, Triticum aestivum
  source 1..1251: mol_type = genomic DNA
atgcgctgctgctgccgcgcgcgccgccctggcctggggcttgccttcttcggccgcctcctcaggacgggcctgaggacagacggcgtcgacgcatacgccctcatcaagtgcttctgcctcgcaaaacggacagacgaggctgtcagcgtgcggctccataggttgcctgaactcggccgtgtacctgatgctttatcatactccgttgttctgaaggtcttgtgtgacgatggcaggagccagcgagcgctcggcctgctccagatgatgtggaaagagggaggtggctgcgcccctaatgtggtggcgtatagcactgtcatccacggcttctgcaaggaaggcaaagtaagcaaggcatgcgagctgttcaatgaaatggtgcagcaaggagttaagcctaatgtggtgacatacacccaagtgattgatgcgctgtgcaaggcaagagcaatggacaaggcagagtcgttccttcggcatatggttgataatgatgttcgacccaacaacgtgacatataagtgtatcatccagggatattcctctttgggctggtgggaagaggcagtaaaaatattcagagaaacgacaagccggggtcttatactagatgatgttactcgcaactcgttcgtgtcctccctttgcaaccatggaagaagcaaggaagctgcggagattgcccatcagataattgaaaatggaacaacagtgagcatttccacatacggtataattcttggagaactttgtaggaatgattgcaccgaggaagcaatcgtactgttccacaaattaggtgcagtggatgtgaagttcgatattacaatattcaataccatgattgatgcaatgtacagggttcgaagaagagaagaagctaacattttgtttgctgcaatatctgccaatggattggtacctaatgcttctacttacagaataatgataacaaatcttttaaaagaaggatcaatggaagaagctgatcatatgttctcatcaatggagacgagtggttatgctcccagctctgttctgttaaatgatatcattagaatgttgctagaaaaaggtgagatagtcaaggctggaaattatttgtctaaagttgatgggaagagcatctcacttgaagcttcaactggtttgttgatgaggcatctattttcaacggaaggaaaatatcatgagcaaataaaatcactccctgaaaggtatcaatattttggagtcagacacagt

SEQ ID NO: 2225 - DNA, 1251 bp, Triticum aestivum; identical to SEQ ID NO: 2224
  source 1..1251: mol_type = genomic DNA

SEQ ID NO: 2226 - DNA, 1251 bp, Triticum aestivum; identical to SEQ ID NO: 2224
  source 1..1251: mol_type = genomic DNA

SEQ ID NO: 2227 - DNA, 1251 bp, Triticum aestivum; identical to SEQ ID NO: 2224
  source 1..1251: mol_type = genomic DNA

SEQ ID NO: 2228 - DNA, 1251 bp, Triticum aestivum; identical to SEQ ID NO: 2224
  source 1..1251: mol_type = genomic DNA

SEQ ID NO: 2229 - DNA, 1251 bp, Triticum aestivum; identical to SEQ ID NO: 2224
  source 1..1251: mol_type = genomic DNA

SEQ ID NO: 2230 - DNA, 1173 bp, Triticum aestivum
  source 1..1173: mol_type = genomic DNA
atgcctggcttctcctccgccgcgtcaatgtcgccactgcgcctccgcctccgcctgcacgcccgccactcctccgcctcgcaaccctcacgccgccagggatgggatccccacgccgccttcgccgccgccacggagtgtgcgcgctccggcaacctcaccccggaggacgcacataacctgttcgacgaattgctgcggcagggcaatcctgtccttgggcgccccctcaacaaccttctcgccgccctcgcccgcgcgccggcgtccagcgcctgcagagatggccccgcactcgtggtcgccctcttcagccgcatatcccaaggcgcccgcctaagggtgctgcacccaacggcctgcacctacggcatcctcatggactgcagctgccgcgcacaccgcctcgatctggcgtttgccttcttcggccgtctcctcaggacgggactgaaggcaggcgtcatagaagtcaacagtctcctcaaaggactctgccacgcaaagcgggcggatgaggccatggaagtgcttcttcacaggatgcctgagctgtttataggagtacagggcacagctgtttatcgttccctaatccagggattttgtacacacggcgatttggtgaaagcaaaggaatatgttactgaaatgatgaagaaaggtatgcctcctcctgatattatgttcttcagttcaatcatgcagaacctatgcacagaaggaagggtaatagaagcacgagatatccttgacttgatagtgcgcattggtatgaggcctgatgttttcatatttaatatactgatcggtggatactgcctagtcggcaagatggaggatgcctcaaaaatatttgatgatatggtgtcatatggtttagaaccttgtaactttacgtatggtatacttattaatggctattgcaaaaataaaaggattgatgacgggcttattctgttcaaagagatgctgcgcaagggacttaaacctacaacttttaattataacgtcatactggatggattatttctggctggacaaactgttgctgcaaaagagaagtttgatgagatggttgaatctggagtaagtgtgtgcattgatacatactctatagttcttggtggactttgtagaaatagctgcagtagcgaagcgatcaccctgttc

SEQ ID NO: 2231 - DNA, 1173 bp, Triticum aestivum; identical to SEQ ID NO: 2230
  source 1..1173: mol_type = genomic DNA

SEQ ID NO: 2232 - DNA, 1452 bp, Triticum aestivum
  source 1..1452: mol_type = genomic DNA
atgtcacgccttcaggtccgctctttctccaactctgtttcttcacacgccaacgagctgctggacaaactccaaggccatctgcactccaggacgctcaggccagacctcgtgcaccaactgttcgacgaaatgctgcgccaaccagtcccagtatcagtacgtgcactcaacggcttatttgctgcccttgcgcgtgcgccgtcctccaccatctgcaccgatgcccctgccctcgccattgatctcttcaaccgcatggcccgagcaggccgtcgccaggtgccagcacccaccattcacacctacagcatgctaattgagtgttgccagcgagcatgccgcccagacctagggcttgccttcttcggccgcctactcaagacaggcatcaagacgaatgccattacctacagcagcttactcaagtgcctctgtgacatgaagcgcacggaggaggctttgggcgtgctgctccacaggatgcccgacgacctgcctaatgccatctcctactcagtaattctcaagagtttctgcgacagtggtaggagccagcttgtgcttgacttgctccggatgatggccgaaaaaggatctgaccactctcccagcgtggtgtcatacagcttggtaatcgatggcttctttaaggagggtgaaataagcaaagcatgcaatctgctccatgaaatgatgcagcagggggttgtgcccgatgtggtgacgtataactcctttatcgatgcgctatgcaaagcaagagcaatggaaaaggcagaggtagttcttcgatcaatggttcataatggtgtccaaccaaatgctgtcacatatagtagcttgatccaaggatattcaactttgggccagttgaaagaagtcgctaggctgttgaaagcaatgagaagccaaggcagtatgccagacgttgttatttgcagctcagtcatggactacctttgcaagcatggaagaatcaaagatgccgaggaaatattttactccatggccgtgaatggccgaaaaccagatatagtctcatacactattatgctccacgggtacgctatagaaggatcccttgttaaaatgattgatctctgtgagctgatggcaagagatggagttgtacccgacctccgttgtgcatatgctaagtatggcatgatggatgtggccatgcttttccttgaagacatgttgaagcagggtgtgaagcctaatgaattcacttatttaactgtgatatctgcattttgcaagatgggcaggatggatgatgcgatggaaaaattcagtgagatgattgatatgggagtaccagttgacaccgaagtttacatgtgcatggttgagggttattttaatcatggtgattccatgaaagccgagaaatttattaccaaaatgaagaacagggatattcatcataagctgcggaaaggtaat

SEQ ID NO: 2233 - DNA, 1470 bp, Triticum aestivum
  source 1..1470: mol_type = genomic DNA
atgtcacgccttcaggtccgctctttctccaactctgtttcttcacacgccaacgagctgctggacaaactccaaggccatctgcactccaggacgctcaggccagacctcgtgcaccaactgttcgacgaaatgctgcgccaaccagtcccagtatcagtacgtgcactcaacggcttatttgctgcccttgcgcgtgcgccgtcctccaccatctgcaccgatgcccctgccctcgccattgatctcttcaaccgcatggcccgagcaggccgtcgccaggtgccagcacccaccattcacacctacagcatgctaattgagtgttgccagcgagcatgccgcccagacctagggcttgccttcttcggccgcctactcaagacaggcatcaagacgaatgccattacctacagcagcttactcaagtgcctctgtgacatgaagcgcacggaggaggctttgggcgtgctgctccacaggatgcccgacgacctgcctaatgccatctcctactcagtaattctcaagagtttctgcgacagtggtaggagccagcttgtgcttgacttgctccggatgatggccgaaaaaggatctgaccactctcccagcgtggtgtcatacagcttggtaatcgatggcttctttaaggagggtgaaataagcaaagcatgcaatctgctccatgaaatgatgcagcagggggttgtgcccgatgtggtgacgtataactcctttatcgatgcgctatgcaaagcaagagcaatggaaaaggcagaggtagttcttcgatcaatggttcataatggtgtccaaccaaatgctgtcacatatagtagcttgatccaaggatattcaactttgggccagttgaaagaagtcgctaggctgttgaaagcaatgagaagccaaggcagtatgccagacgttgttatttgcagctcagtcatggactacctttgcaagcatggaagaatcaaagatgccgaggaaatattttactccatggccgtgaatggccgaaaaccagatatagtctcatacactattatgctccacgggtacgctatagaaggatcccttgttaaaatgattgatctctgtgagctgatggcaagagatggagttgtacccgacctccgttgtttcaacatactgattaatgcatatgctaagtatggcatgatggatgtggccatgcttttccttgaagacatgttgaagcagggtgtgaagcctaatgaattcacttatttaactgtgatatctgcattttgcaagatgggcaggatggatgatgcgatggaaaaattcagtgagatgattgatatgggagtaccagttgacaccgaagtttacatgtgcatggttgagggttattttaatcatggtgattccatgaaagccgagaaatttattaccaaaatgaagaacagggatattcatcataagctgcggaaaggtaat

SEQ ID NO: 2234 - DNA, 1470 bp, Triticum aestivum
  source 1..1470: mol_type = genomic DNA
atgtcacgccttcaggtccgctctttctccaactctgtttcttcacacgccaacgagctgctggacaaactccaaggccatctgcactccaggacgctcaggccagacctcgtgcaccaactgttcgacgaaatgctgcgccaaccagtcccagtatcagtacgtgcactcaacggcttatttgctgcccttgcgcgtgcgccgtcctccaccatctgcaccgatgcccctgccctcgccattgatctcttcaaccgcatggcccgagcaggccgtcgccaggtgccagcacccaccattcacacctacagcatactaattgagtgttgccagcgagcatgccgcccagacctagggcttgccttcttcggccgcctactcaagacaggcatcaagacgaatgccattacctacagcagcttactcaagtgcctctgtgacatgaagcgcacggaggaggctttgggcgtgctgctccacaggatgcccgacgacctgcctaatgccatctcctactcagtaattctcaagagtttctgcgacagtggtaggagccagcttgtgcttgacttgctccggatgatggccgaaaaaggatctgaccactctcccagcgtggtgtcatacagcttggtaatcgatggcttctttaaggagggtgaaataagcaaagcatgcaatctgctccatgaaatgatgcagcagggggttgtgcccgatgtggtgacgtataactcctttatcgatgcgctatgcaaagcaagagcaatggaaaaggcagaggtagttcttcgatcaatggttcataatggtgtccaaccaaatgctgtcacatatagtagcttgatccaaggatattcaactttgggccagttgaaagaagtcgctaggctgttgaaagcaatgagaagccaaggcagtatgccagacgttgttatttgcagctcagtcatggactacctttgcaagcatggaagaatcaaagatgccgaggaaatattttactccatggccgtgaatggccgaaaaccagatatagtctcatacactattatgctccacgggtacgctatagaaggatcccttgttaaaatgattgatctctgtgagctgatggcaagagatggagttgtacccgacctccgttgtttcaacatactgattaatgcatatgctaagtatggcatgatggatgtggccatgcttttccttgaagacatgttgaagcagggtgtgaagcctaatgaattcacttatttaactgtgatatctgcattttgcaagatgggcaggatggatgatgcgatggaaaaattcagtgagatgattgatatgggagtaccagttgacaccgaagtttacatgtgcatggttgagggttattttaatcatggtgattccatgaaagccgagaaatttattaccaaaatgaagaacagggatattcatcataagctgcggaaaggtaat

SEQ ID NO: 2235 - DNA, 1470 bp, Triticum aestivum; identical to SEQ ID NO: 2233
  source 1..1470: mol_type = genomic DNA

SEQ ID NO: 2236 - DNA, 1470 bp, Triticum aestivum; identical to SEQ ID NO: 2233
  source 1..1470: mol_type = genomic DNA

SEQ ID NO: 2237 - DNA, 1470 bp, Triticum aestivum; identical to SEQ ID NO: 2233
  source 1..1470: mol_type = genomic DNA

SEQ ID NO: 2238 - DNA, 1626 bp, Triticum aestivum
  source 1..1626: mol_type = genomic DNA
atgcctcgcctctcctccaccacgccaatgtcaccaccacgcctccgcctccgactccgcggccgccactcctcctccacctctcatccctcacgcatctgggatccccacgccgccttcgccggcgcgacgcagcgggcgcactctggcaacctcaccccggaggacgcacaccacctgttcgacgaattgctgcggcagggcaatcctgtccaggagcgtcccttgactaactttctggctgccctcgcccgcgcgcccgcgtccgcatcctgcagcgatggccccgccctggccgtagccctcttcggtcgtttgtcccgaggcgccggacgacgcgtggcacagccaaatgtcttcacctatggcgtcctcatggactgctgctgccgcgcgtgccgcccggatctggcgctcgctttcttcggccgtctcttcaggaagggcctggaggcaaaccgagtcatcttctgcaccctcctcaagggactctgccacgcaaagcgcacagatgaggctctggacgtgctgcttcacaggatgcctgagctgggctgcacccccaacgtggtggcatataccacggtcatccacggcttctttaaggaaggccaagtaggcaaggcatgcaatctgttccatggaatggcgcagcagggcgttgcgcctaatttggtgacatataactcggttattgatgcgttgtgcaaggccaaagcaatggacaaggcagagtatttccttggtcagatggttgatgatggtgtcgtacctgataatgtgacatataatagcctcatccatggatattcctcttcaggccactggaaggaggcagttagggtattcaaagagatgacaagtcggagggttacagcagatgtgcatacttacaacatgtttatgacctttctttgcaaacatggaagaagcaaagaagctgcaggaatttttgataccatggctattaagggcctgaaacctgacaacgtttcatatgctattctccttcatgggtatgccaccgaaggatgcttagttgatatgattaatctcttcaattcaatggaaagagattgtattctacctgactgtcgtatcttcaacatactgattaatgcatatgctaaatctgggaagcttgataaggctatgcttatcttcaatgaaatgcagaaacaaggagtgagtccaaatgcagtcacatattcaaccgtaatacatacattttgcaaaaagggtaggttggatgatgctgtgataaagtttaatcagatgattgatacaggagtacgacagggcacagctgtttatggttctctaatccagggtttttgtacacacggcgatttggtgaaagcaaaggaattgcttactgaaatgatgaacaaaggtatgcttcctcctgatatcaagttcttccattcaatcatgcagaacctttgcacagaaggaagggtaatagaagcacgggatgtccttggcttgatagcgcacataggtatgaggcctgatgtttgcacatttaatatactgatcggtggatactgcctagtcggcaagatggaggatgcctcaaaaatatttgatgatatgatgtcatatggcttagaaccttctaattgt

SEQ ID NO: 2239 - DNA, 1626 bp, Triticum aestivum; identical to SEQ ID NO: 2238
  source 1..1626: mol_type = genomic DNA

SEQ ID NO: 2240 - DNA, 1611 bp, Triticum aestivum
  source 1..1611: mol_type = genomic DNA
atggttgagcatggaggtagctgccaacctaatgtggtgacctatagcaccgtgattgatggcttgttgacagagggtgaggtgaacaaggcttacagcctattttgtgaaatgttacagaggggaatttcgccgaatgttgtgacctgtagttcaatcatctctggcatgtgcaagcttcatgcgatggacaaggcggaggaggttcttcaacagatgtttgagagacgaattctgccagatgttgccacatatactagtctaatacatggatattattcattaggacagtgcaaagaggtggattggattttatgggaaatgtctagaaatggtgttcaaccagatattgtaacttacaatatacagatggattatctttgtaagagcggaaggtgcgcaaaagctaggaaaatatttgattccatggtcggtttgggccaaaaaccagatgttactacctacaacgttctgcttcatgggtatgctatggaaagatcttttcatgatatgaattgtctcattgagttgatggatgataatggtatttcaccagatcattatggctacaacatactcatatctgcttatgctaaagaaaaaatggttgatgaagtaatgcatatatttacaaaaatgcggcagcaaggactgaaccctgatgtagtgaactatggagcggcagtaaacttgctttccaagattggccgaatggatgatgctatgtcccaattcaatcaaatgataactgaagggttagctcctgatatcatagttttcaccccccttattagtggtttctgttcttgtggcaaatgggagaaggttgatgaactattttctgagatgttggatcgcggcatctgtcccaacacagtgttcttcaacacaatcatggaccgcctttgcaaaaatgaaagggttatggaagcccaagatctcttcgacctgatggtacacatgggtgtgaagcctgatgtgtgtacttataacacactgataggtggatacttgttcgttggtaagatggatgaagtgagcaagttacttgacaatatggtctcaattggcatggaaccagatgttatcacctataacatactgattgatggttactctaagaatggaaagatagatgatgcattggttgtttttagggggatgttggaaaggaaggataagccttctgttatcacttttaatattatgattggtgcgttgcttaaatgtcacaggaaggaagaagcaaaagatttgtttgacggtatctgggccaaaggattagttcctgatgttgttacatatagcttaatgatacaaaaacttatagaagaaggttctctacaagagtctgatgatctattcctttctatggagaagaatggatgtgctgccgactcccgcatgctaaatgctatagttagaagcttacttcagaaaggggatgtgcccagggctgggacttatctgtctaaaattaatgagaggagcttcacccttgaaggttccacagctaccttgttgactgcacttgcgtcaggggggagaggccaggaatataaggagttactccctgagaaataccactcttttctggaacagggcattgat

SEQ ID NO: 2241 - DNA, 1611 bp, Triticum aestivum; identical to SEQ ID NO: 2240
  source 1..1611: mol_type = genomic DNA

SEQ ID NO: 2242 - DNA, 1611 bp, Triticum aestivum; identical to SEQ ID NO: 2240
  source 1..1611: mol_type = genomic DNA

SEQ ID NO: 2243 - DNA, 1611 bp, Triticum aestivum; identical to SEQ ID NO: 2240
  source 1..1611: mol_type = genomic DNA

SEQ ID NO: 2244 - DNA, 1611 bp, Triticum aestivum; identical to SEQ ID NO: 2240
  source 1..1611: mol_type = genomic DNA

SEQ ID NO: 2245 - DNA, 1611 bp, Triticum aestivum; identical to SEQ ID NO: 2240
  source 1..1611: mol_type = genomic DNA

SEQ ID NO: 2246 - DNA, 663 bp, Triticum aestivum
  source 1..663: mol_type = genomic DNA
atgatcgccgtgtctctcttcaaccgcctgtgccgagaagccagcccacatgcgtcgcctcttacagtccacacctacggcatcctcacggactgctgctgccgcgcgcgtcgccctgacctggggcttgccttcttcggccgcctcctcaggacgggcctgaggacagacggcgtcgacgcgtacgccctcatcaagtgcttctgcctcgcaaaacggacagatgaggctgtcagcgtgctgctccataggttgcctgaactcggctgtgcgcctgatgccttatcatactccgttgttctgaaggtcttgtgtgacgatggccggagccagcgagcgttcgacctgctccagatgatgtcgaaagaaggaggtggctgcgcccccaacgtggtggcatatagcacggtcatccacggcttctgtaaggaaggcaaagtaagcaaggcatgcgatctgttcgatgaaatggtgcagcaaggagttaagcctaatgtggtgacatatacctcgataattgatgcgctgtgcaaggccagagcaatggacaaggcagagtcgttccttcggcatatggtcgataatgatgttcgacctgctatattatctactcttttggactatattgggctttattttccacctttatattatttttgggac

SEQ ID NO: 2247 - DNA, 1629 bp, Triticum aestivum
  source 1..1629: mol_type = genomic DNA
atggcagtgatgcctcgcctccactccaccacgcccatgccccgcctcctccgccgcctctcctccacctccacctccacctcggcgccctcacgctgctgggaccccagcgccgccctcgccgcggccacggagcgcgtccgcgccgggacgctccgcccggcagacgcacaccagctgttcgacgaattgctgcagcaggcaaccccggtccctggtccagccctgaacggcttcctcgccgcccttgcccgtgctccagcctccgccgcctgcacagacagccccgccctcgccgtgtctctcttcaaccgcctgtgccgagaagccagcccacatgcgtcgcctcttacagtccacacctacggcatcctcacggactgctgctgccgcgcgcgtcgccctgacctggggcttgccttcttcggccgcctcctcaggacgggcctgaggacagacggcgtcgacgcgtacgccctcatcaagtgcttctgcctcgcaaaacggacagatgaggctgtcagcgtgctgctccataggttgcctgaactcggctgtgcgcctgatgccttatcatactccgtcgttctgaaggtcttgtgtgacgatggccggagccagcgagcgttcgacctgctccagatgatgtcgaaagaaggaggtggctgcgcccccaacgtggtggcatatagcacggtcatccacggcttctgtaaggaaggcaaagtaagcaaggcatgcgatctgttcgatgaaatggtgcagcaaggagttaagcctaatgtggtgacatatacctcgataattgatgcgctgtgcaaggccagagcaatggacaaggcagagtcgttccttcggcatatggtcgataatgatgttcgacccaacaacgtgacatataagtatatgatccagggatattcctctttgggctggtgggaagaggcagtaaaaatattcagagaaactacaagccggggtcttatactagacgatgttactcgcaactcattcgtggcctccctttgcaaccatggaagaagcaaggaagctgcagagattgcccgtcagatgattgaaactggaacaacagtgagcatttccacatatggtataattcttggagaactttgtaggaataattgcactgaggaagcaatcgtactgttccacaaattaggtgcagtgaatgtgaagtttgatattacaatattcaataccatgattgatgcaatgtacagggttcgaagaagagaagaagctaacattttgtttgctgcaatatctgccaatggattggtacctaatgcttctacttacagaataatgataacaaatcttttaaaagaaggatcaatggaagaagctgatcatatgttttcatcaatggagacgagtggttatgctcccagctccgttctgttaaatgatatcatcagaatgttgctagaaaaaggtgagatagtcaaggctggaaattatttgtctaaagttgatgggaagagcatctcacttgaagattcaactggtttgtcgatggtgcatctattttcaagagaaggcaaatatcatgagcaaataaaatcactccctgcaatctatcgatttttcggaggagtcagacacagt

SEQ ID NO: 2248 - DNA, 1632 bp, Triticum aestivum
  source 1..1632: mol_type = genomic DNA
atggcagtgatgcctcgcttccactccaccacgcccactccccgcctcctccgccgcctctcctccacctccgcctccacctcggcgcccccacgctgctgggatcccagcgccgccctcaccgcggccacggagcgcgtccgcgccgggacgctcagcccggcagacgcacaccacctgttcgacgaattgttgcagcggccaaccccggtccctggtccagccctgaacggcttcctcgcggcccttgcccgtgctccagcctccgccgcctgcagagacagcccctccctcgccgtctctatcttcaaccgcctgtgccgagaagccagcccacatggacatgcgtcgcctcttacagcccacacctacggcatcctcatgcgctgctgctgccgcgcgcgccgccctggcctggggcttgccttcttcggccgcctcctcaggacgggcctgaggacagacggcgtcgacgcatacgccctcatcaagtgcttctgcctcgcaaaacggacagacgaggctgtcagcgtgctgctccataggttgcctgaactcggccgtgtacctgatgctttatcatactccgttgttctgaaggtcttgtgtgacgatggcaggagccagcgagcgctcggcctgctccagatgatgtggaaagaaggaggtggctgcgcccctaatgtggtggcgtatagcactgtcatccacggcttctgcaaggaaggcaaagtaagcaaggcatgcgagctgttcaatgaaatggtgcagcaaggagttaagcctaatgtggtgacatacacctcagtgattgatgcgctgtgcaaggcaagagcaatggacaaggcagagtcgttccttcggcatatggttgataatgatgttcgacccaacaacgtgacatataagtgtatcatccagggatattcctctttgggctggtgggaagaggcagtaaaaatattcagagaaacgacaagccagggtcttatactagatgatgttactcgcaactcgttcgtgtcctccctttgcaaccatggaagaagcaaggaagctgcggagattgcccatcagataattgaaaatggaacaacagtgagcatttccacatacggtataattcttggagaactttgtaggaatgattgcaccgaggaagcaatcgtactgttccacaaattaggtgcagtggatgtgaagttcgatattacaatattcaataccatgattgatgcaatgtacagggttcgaagaagagaagaagctaacattttgtttgctgcaatatctgccaatggattggtacctaatgcttctacttacagaataatgataacaaatcttttaaaagaaggatcaatggaagaagctgatcatatgttctcatcaatggagacgagtggttatgctcccagctctgttctgttaaatgatatcattagaatgttgctagaaaaaggtgagatagtcaaggctggaaattatttgtctaaagttgatgggaagagcatctcacttgaagcttcaactggtttgttgatgaggcatctattttcaacggaaggaaaatatcatgagcaaataaaatcactccctgaaaggtatcaattttttggagtcagacacggt

SEQ ID NO: 2249 - DNA, 879 bp, Triticum aestivum
  source 1..879: mol_type = genomic DNA
atgtttgacttcattctaggtattggtcggcggcctgatgtgattatgtacaattcactgatggatggatattgccttgttggcaaggtggaggaagcactgagagtacttgatgctatgaagtctgctggcctccaacctactgctgttacgtatgctatacttcttaatggctactgtaaaattggcaggatcgccgatggattgagtcttttcagggaaatgtcactcagcggggttaaacccacgacttttatgtacaacattatatttgatgggctgtttcgctccgggagagcagtttctgcaaaggaaaaattccgtacgatgactgaaagtggcataccagtgggcgttgacacatactacatagttcttcatggactttgtaaaaataattgcactggtgaagcaatagagctgttcaagaaactacgtgcaatgaacgtgaagattgatgtcataacactcaataccatgatttctgtaatgtttaaaactaggagaattgaagaagccaaggatttgtttgctactatatcagccatcggattggtgccttctgttgtgacttacagtgtaatgatgacgaatttcatagaagaagggttgctggcagaggctgatgatatgtttttagcaatggagaaggctggctgtgctcctgactcgagactgctaaatcacgtggtcagagtgttgctggagaatggtgcagttgtaaaggctgcaacttatctcgctaaacttgatgcaaaacagctgtcagttgaagcttcgacggtttcgttaatactatctctcttctcaaggaaagggaaattaagggagcatgtaaaattgcttccggtaaagtaccagcctcctgagatgttggac

SEQ ID NO: 2250 - DNA, 1602 bp, Triticum aestivum
  source 1..1602: mol_type = genomic DNA
atggttgatcaaggaattgaacccaatatcaagacatataactgtctgatccatggatattctacttttggtcagtggaaggaggcacttagggtattcaaagaaatggcaagtcttggtgttgtaccagacgttgtcacgttgacctcattaatcgattccctttgcaagcacagaaggacaaaggaagctagagaaatttttgactctatggctgcaaagggcctgaaacctaatatcgtctcctactctactatgcttaatgggtatgtcaaagaaggatccttcgaggatatgactgatctcttcaattcgatggtacggaatggtgttgtaccaaaccaccatattttcaacatactgatcaatgcatatgctaaacgtggactgatggatgaggctatgcacatgttcgaagtaatgaggcaacaaggagtaaacccagatgtagttgactatctagtaataatggattcactttgcaaaatgggtaggatggatgctgctctggacaaatttaatcagatggtcaatcaaggagtttcacctaacaaagctgtttaccaatgcctggttctgggttcttgctctcatggtcattttgtgaaagccaaggatttgatctctgaagcaattaatagaggtctgttttctaacagtgtgttcttctatcctgtaataaacgacctatgcaaagaaggaaaggtaaacgaggcacaggatatgtttgacttcattctaggtattggtcggcggcctgatgtgattatgtacaattcactgatggatggatattgccttgttggcaaggtggaggaagcactgagagtacttgatgctatgaagtctgctggcctccaacctactgctgttacgtatgctatacttcttaatggctactgtaaaattggcaggatcaccgatggattgagtcttttcagggaaatgtcactcagcggggttaaacccacgacttttatgtacaacattatatttgatgggctgttttgctccgggagagcagtttctgcaaaggaaaaattccgtacgatgactgaaagtggcataccagtgggcgttgacacatacaacatagttcttcatggactttgtaaaaataattgcactggtgaagcaatagagctgttcaagaaactacgtgcaatgaacgtgaagattgatgtcataacactcaataccatgatttctgtaatgtttaaaactaggagaattgaagaagccaaggatttgtttgctactatatcagccatcggattggtgccttctattgtgacttacagtgtaatgatgacgaatttcatagaagaagggttgctggcagaggctgatgatatgtttttagcaatggagaaggctggctgtgctcctgactcgagactgctaaatcacgtggtcagagtgttgctggagaatggtgcagttgtaaaggctgcaacttatctcgctaaacttgatgcaaaacagctgtcagttgaagcttcgacggtttcgttaatactatctctcttctcaaggaaagggaaattaagggagcatgtaaaattgcttccggtaaagtaccagcctcctgagatgttggac

SEQ ID NO: 2251 - DNA, 1602 bp, Triticum aestivum; identical to SEQ ID NO: 2250
  source 1..1602: mol_type = genomic DNA

SEQ ID NO: 2252 - DNA, 879 bp, Triticum aestivum; identical to SEQ ID NO: 2249
  source 1..879: mol_type = genomic DNA

SEQ ID NO: 2253 - DNA, 624 bp, Triticum aestivum
  source 1..624: mol_type = genomic DNA
atgtacaacattatatttgatgggctgtttcgctccgggagagcagtttctgcaaaggaaaaattccgtacgatgactgaaagtggcataccagtgggcgttgacacatacaacatagttcttcatggactttgtaaaaataattgcactggtgaagcaatagagctgttcaagaaactacgtgcaatgaacgtgaagattgatgtcataacactcaataccatgatttctgtaatgtttaaaactaggagaattgaagaagccaaggatttgtttgctactatatcagccatcagattggtgccttctgttgtgacttacagtgtaatgatgacgaatttcatagaagaagggttgctggcagaggctgatgatatgtttttagcaatggagaaggctggctgtgctcctgactcgagactgctaaatcacgtggtcagagtgttgctggagaatggtgcagttgtaaaggctgcaacttatctcgctaaacttgatgcaaaacagctgtcagttgaagcttcgacggtttcgttaatactatctctcttctcaaggaaagggaaattaagggagcatgtaaaattgcttccggtaaagtaccagcctcctgagatgttggac

SEQ ID NO: 2254 - DNA, 1152 bp, Triticum aestivum
  source 1..1152: mol_type = genomic DNA
atgagccgccgctttgtccccgtcgacaggcgcatcttggagcggaacatcaaggctcggtaccacgctggagacattggcaccgaggatgcactcaacctgttcgacgaattgatccaggttgctgggccttcctcagtcctcgccatcaactgcctcctcaccgttgtcggccgtgattgccccgcgctcggcgtctccctcttcaaccgtgttgcaagagccaaggtgcctccccacaatatcacctatagcattctagtcgattgctgctgccgtgctggccgcttggaccttggacacgctgccatgggacacgttattaagctgggatttgcagcagaagccatcgtcaatttcagccacctactcaaagccatctgcgccgagaagaagaccagctatgcaatggacatcgtactccggataatgcccgagtttaactgcataccaaacattttctcctataacattcttttcaagggtctctgcaacgagaagaggagccaagaggctcccgagctgattcacatcatggctgaggatggaggcagctgccaacctaatgtcgtgtcctataacaccgtaattgatggcttgttgaaagagggtgaggtgggccaggcctacagcctattttgtgtcatgctacagaggggaatttcgccgaatgttgtgacctgcacttcaatcatctctggcatgtgcaaagttcatgcgatggacaaggcagaggaggttcttcaacagatgactgatagacgaattctgccagatgttgccacatataacagtctcatacatggatattattcattaggacagtgcaaagaggttgatcggatttttaaggagatgactagaaatggtgtccaaccaaatgttgtaacttacaatatacagatggattatctttgcaagagcggaaggtgtgcggaagctaggaagatttttgattccatgatcagtttgggccaaaaaccgaccgttactacctacaacatactgcttcatgggtatgctatggaaagatcttttcatgatatgaattgtatcattgagttgatggatgataatggtatttcaccagatcattattgctacaacatactcatatctgcatataaaaaaaaaagggcaacctggtgcatg

SEQ ID NO: 2255 - DNA, 1635 bp, Triticum aestivum
  source 1..1635: mol_type = genomic DNA
atgagccgccgctttgtccccgtcgacaggcgcatcttggagcggaacatcaaggctcggtaccacgctggagacattggcaccgaggatgcactcaacctgttcgacgaattgatccaggttgctgggccttcctcagtcctcgccatcaactgcctcctcaccgttgtcggccgtgattgccccgcgctcggcgtctccctcttcaaccgtgttgcaagagccaaggtgcctccccacaatatcacctatagcattctagtcgattgctgctgccgtgctggccgcttggaccttggacacgctgccatgggacacgttattaagctgggatttgcagcagaagccatcgtcaatttcagccacctactcaaagccatctgcgccgagaagaagaccaactatgcaatggacatcgtactccggataatgcccgagtttaactgcataccaaacattttctcctataacattcttttcaagggtctctgcaacgagaagaggagccaagaggctctcgagctgattcacatcatggctgaggatggaggcagctgccaacctaatgtcgtgtcctataacaccgtaattgatggcttgttgaaagagggtgaggtgggccaggcctacagcctattttgtgtcatgctacagaggggaatttcgccgaatgttgtgacctgcacttcaatcatctctggcatgtgcaaagttcatgcgatggacaaggcagaggaggttcttcaacagatgactgatagacgaattcttccagatgttgccacatataacagtctcatacatggatattattcattaggacagtgcaaagaggttgatcggattttcaaggagatgactagaaatggtgtccaaccaaatgttgtaacttacaatatacagatggattatctttgcaagagcggaaggtgtgcagaagctaggaagatttttgattccatgatcagtttgggccaaaaaccgaccgttactacctacaacatactgcttcatgggtatgctatggaaagatcttttcatgatatgaattgtatcattgagttgatggatgataatggtatttcaccagatcattattgctacaacatactcacatctgcatatgctaaagaaaaaatggttgatgaagtaatgcatatatctacaaaaatgcggcagcaaggactgaaccctgatgtagagaactatggagcggtagtaaacttgctttccaagattggccgaatggatgatgctatgtcccaattcaatcaaatgataactgaagggttagctcctgatatcatagttttcaccccccttattagtggtttctgttcttgtggcaaatgggagaaggttgatgaactattttctgagatgttggatcgtggcatctgtcccgacacagtgttcttcaacactgttatggatcacctttgcaaaaatggaagggttatagaagcccaagatgtgttcgacctgatggtacacatgggtgtgaagcctgacgtgcgtagtcatgtcacactgatgcatggatactttgcagatggtaagatggatgaaatgaggaagttacttgaaaatatgtgctcaattggcttgaaactgatgttgtcacctatagcatac

SEQ ID NO: 2256 - DNA, 1629 bp, Triticum aestivum
  source 1..1629: mol_type = genomic DNA
atgcctcgcttctcctccagcacgccaatgtcgccaccccgcctccgcctccgactcggcggacgccactcctcctccacctctcatccctcacgcatctgggatccccacgccgccttcgccacaggcacggagcgggcggtatttggcacgctcactacggaggacgcacaccacctgttcgacgaattgctgcggcatggcaatcctgtccaggagcgctccttgaataactttctagctaccctcgcccgcgcgcccacgtccgcatcctgcagcgacggccccgccctagccgtcgccctcttcggccgtttgtcccgaggcgccggacgacgggtggcgcagccaaatgtcttcacctatggcgtcctcatggactgctgctgccgtgcgcgccgcctggatctggtgatcgccttcttcggccgtctcctcaagacgggcctggaggcagaccgagtcgttttcagcaccctcctcaagggactctgccatgcaaagcgctcagatgaggctctggacgtgctgcttcacaggatgcctgggctgggctgcacccccggcgtagtggcgtataacaccgtcatccatggcttctttaaggaaggtcaagtaggcaaggcatgcaatctatttcatgaaatggcgcagcagggcgttatgcctgatgtggtgacatatagctcggttattgatgcgctgtgcaaggccagagcaatggacaaggcagagtatttccttcgtcagatggttgatgatggtgtcgtacctaataatgtcacatataatagcctcatccatggatattcctcttcaggccattggaaggaggcagttagggtattcaaagagatgacaagtcggagggttacaccagatgtgcatacttacaacatgtttatgacctttctttgcaaacatggaagaagcaaagaagctgcaggaatttttgagaccatggctatgaagggcctgaaacctaacaacgtttcatatgctattctccttcatgggtatgccactgaaggatgcttagttgatatgattaatctcttcaattcaatgactagagatggtattcggcctaactgtcacactttgaacatactgattaatgcatatgctaaatctggcatgatggatgaggctatgcttatctttaaaggaatgcggaaacagggagtgagtccagatgtagtcacctattcaactgtaatacatgcattttgcaaaatgggtagcttggacattgctatggacaaatttaaccagatggttgatatgggagtacgaccgaatgcagttgtttatcattccctaatccagagtttttgtacacatggggatttcgtgaaagcaaaggaattggttactgaaatgaggaacaaaggtatgcgtcctcctgatattaacttcttccattcaataatgcagaacctatgcacagaaggaagggtaacagaagcacgggatatccttgacttgatagtgcacataggtatgaggcctgatgttctcatatttagtttactgatcgatggatactgcctagtctccaagatggaggatgcatcaaaaatatttgatgatatggtgtcatatggtttggaaccttctaatattacg

SEQ ID NO: 2257 - DNA, 1629 bp, Triticum aestivum
  source 1..1629: mol_type = genomic DNA
atgcctcgcttctcctccagcacgccaatgtcgccaccccgcctccgcctccgactcggcggacgccactcctcctccacctctcatccctcacgcatctgggatccccacgccgccttcgccaccggcacggagcgggcggtatttggcacgctcactacggaggacgcacaccacctgttcgacgaattgctgcggcatggcaatcctgtccaggagcgctccttgaataactttctagctaccctcgcccgcgcgcccacgtccgcatcctgcagcgacggccccgccctagccgtcgccctcttcggccgtttgtcccgaggcgccggacgacgggtggcgcagccaaatgtcttcacctatggcgtcctcatggactgctgctgccgtgcgcgccgcctggatctggtgatcgccttcttcggccgtctcctcaagacgggcctggaggcagaccgagtcgttttcagcaccctcctcaagggactctgccatgcaaagcgctcagatgaggctctggacgtgctgcttcacaggatgcctgggctgggctgcacccccggcgtagtggcgtataacaccgtcatccatggcttctttaaggaaggtcaagtaggcaaggcatgcaatctatttcatgaaatggcgcagcagggcgttatgcctgatgtggtgacatatagctcggttattgatgcgctgtgcaaggccagagcaatggacaaggcagagtatttccttcgtcagatggttgatgatggtgtcgtacctaataatgtcacatataatagcctcatccatggatattcctcttcaggccattggaaggaggcagttagggtattcaaagagatgacaagtcggagggttacaccagatgtgcatacttacaacatgtttatgacctttctttgcaaacatggaagaagcaaagaagctgcaggaatttttgagaccatggctatgaagggcctgaaacctaacaacgtttcatatgctattctccttcatgggtatgccactgaaggatgcttagttgatatgattaatctcttcaattcaatgactagagatggtattcggcctaactgtcacactttgaacatactgattaatgcatatgctaaatctggcatgatggatgaggctatgcttatctttaaaggaatgcggaaacagggagtgagtccagatgtagtcacctattcaactgtaatacatgcattttgcaaaatgggtagcttggacattgctatggacaaatttaaccagatggttgatatgggagtacgaccgaatgcagttgtttatcattccctaatccagagtttttgtacacatggggatttcgtgaaagcaaaggaattggttactgaaatgaggaacaaaggtatgcgtcctcctgatattaacttcttccattcaataatgcagaacctatgcacagaaggaagggtaacagaagcacgggatatccttgacttgatagtgcacataggtatgaggcctgatgttctcatatttagtttactgatcgatggatactgcctagtctccaagatggaggatgcatcaaaaatatttgatgatatggtgtcatatggtttggaaccttctaatattacg

SEQ ID NO: 2258 - DNA, 1629 bp, Triticum aestivum; identical to SEQ ID NO: 2257
  source 1..1629: mol_type = genomic DNA

SEQ ID NO: 2259 - DNA, 1629 bp, Triticum aestivum; identical to SEQ ID NO: 2256
  source 1..1629: mol_type = genomic DNA

SEQ ID NO: 2260 - DNA, 1629 bp, Triticum aestivum; identical to SEQ ID NO: 2257
  source 1..1629: mol_type = genomic DNA

SEQ ID NO: 2261 - DNA, 1254 bp, Triticum aestivum
  source 1..1254: mol_type = genomic DNA
atggactgctgctgccgtgcgcgccgcctggatctggtgatcgccttcttcggccgtctcctcaagacgggcctggaggcagaccgagtcgttttcagcaccctcctcaagggactctgccatgcaaagcgctcagatgaggctctggacgtgctgcttcacaggatgcctgggctgggctgcacccccggcgtagtggcgtataacaccgtcatccatggcttctttaaggaaggtcaagtaggcaaggcatgcaatctatttcatgaaatggcgcagcagggcgttatgcctgatgtggtgacatatagctcggttattgatgcgctgtgcaaggccagagcaatggacaaggcagagtatttccttcgtcagatggttgatgatggtgtcgtacctaataatgtcacatataatagcctcatccatggatattcctcttcaggccattggaaggaggcagttagggtattcaaagagatgacaagtcggagggttacaccagatgtgcatacttacaacatgtttatgacctttctttgcaaacatggaagaagcaaagaagctgcaggaatttttgagaccatggctatgaagggcctgaaacctaacaacgtttcatatgctattctccttcatgggtatgccactgaaggatgcttagttgatatgattaatctcttcaattcaatgactagagatggtattcggcctaactgtcacactttgaacatactgattaatgcatatgctaaatctggcatgatggatgaggctatgcttatctttaaaggaatgcggaaacagggagtgagtccagatgtagtcacctattcaactgtaatacatgcattttgcaaaatgggtagcttggacattgctatggacaaatttaaccagatggttgatatgggagtacgaccgaatgcagttgtttatcattccctaatccagagtttttgtacacatggggatttcgtgaaagcaaaggaattggttactgaaatgaggaacaaaggtatgcgtcctcctgatattaacttcttccattcaataatgcagaacctatgcacagaaggaagggtaacagaagcacgggatatccttgacttgatagtgcacataggtatgaggcctgatgttctcatatttagtttactgatcgatggatactgcctagtctccaagatggaggatgcatcaaaaatatttgatgatatggtgtcatatggtttggaaccttctaatattacg

SEQ ID NO: 2262 - DNA, 1551 bp, Triticum aestivum
  source 1..1551: mol_type = genomic DNA
atgcgcccatgccgcacgcctctcctcgactccacctcgccgctgtccgtgctcctcctcgaccacctccaccgcaatcgcccctcccctcccccctcagcctcgccgccgtcagccttctggtctcccatcgccgcattcgccgctgccacgaagcgcgcccgagccgggacgctcagccctgaggacgcacaccacctgttcgacgaattgctacgccagtccaacccggttcccaatcgcttcctgaacaacttccttgccgccctcgcccgtgctccaccctccgacgtctgcggagatggccccgccctcaccgtcgccctcttcaaccgcctgtgccgagaagaagccggcccttgtgtagcgccgcccactatctatacctacagcattctaatggacagctgctgccgcgtgggtcgcccggaccttgggcttgctgtcttcggacgcctactcaagtcgggcttcaaggcagaccagatcactgccagcagcctcctcatgtgcctctgcgatgtaggacagacaaacgagcctgtggacgtgctgcttcgtaggatctccaagctcggctgtgagcctaatgtcatcccatacaacatagttcttaagagcttatgtgacagtagaaggagccagcaagctcttgacctgctcctgatgatggcacaaagaggttgccgctcccctgatgtggtgtcatataacatcgtcattcatggcttatttaaggaaggtgaagtaagcatggcgtgctcattattctatgaaatgatgcggcaaagggttatgcctaatgtggtgacatatagatcgatgattggtgcgttgtgcaaggtcggggcaacggacaaggcaaagatggtccttggtcatatggttggtaatggttttcgaccagatatgtatacttggaactcattcatggcatctctttgcaagcagggaagaagcaaggaagctgcacaactttttgattacatggtcgccaagggctacaaacctgatgttgtcacgtactctactctgcttcatgggtatgctactgaaggatgcttcactgatatgattaatctctttaattcaatggaaggcaacggtattgtagctaacagctgtgtttttaacatactaattgacgcatatgctaaacgtggaatgatgcatgaagctatgctcatatttactgaaatgcgggaacgaagagtgagtcctgatatattcacctatggaattataatagctgcactttgcagaatgggtaggctatctgatgctatggagaaaataaatgaaatggttgctgcaggattacaaccggacaaggctgtttactattccctaattcagggtttttgtacacatgatgatttggtcaaagctaaggagttggtttctgagatgatgaccaaaggtattcctcgtcctaacattgtgttcttcaactcggtaatagccagtctgtgcaaagaaggaagggttaaggatgcacacggtatctttgacttggctatgaacattggtgagaggcccgatttaattcac

SEQ ID NO: 2263 - DNA, 804 bp, Triticum aestivum
  source 1..804: mol_type = genomic DNA
atgtcgctgctccgtctccgcctccgcctccatgcccgccgctcctactccacctcgcatcccccacgcagccagggctgggatccccacgccgccttcgctgctgccacggagcgcgcgcgatctggcaatctcacctcggaggacgcacacaagctgttcgaccaattgctcctgcaggctaatccggtcaacatgcgccttcccaacgaccttctcaccgccctggctcgcgcgcctgcgttcgcagcctgcagcaacggccccgccctcgccgtcgccctcttcagccgtttgtcccaaagtgcccgccaacgggtggtgcagccaacggcctgcacccacggcatcctcatggactgctgctgccgcgcacaccgcctggatctggcgctcgccttcttcgcccgtctcctcaggacgggactcaaggcaggcgtcatagaagtcaacactcttctcaagggactctgccgcgcaaagcgggctgatgaggctctggacattctgcttcacaggatgcctgagctgggctgcacccccaacgtggtggcatataccacggtcatccacggcttctttaaggaaggccaagtaagcaaggcatgcaatctattccatgaaatggcgctgcagggcgttacacctgatgtggtgacatataactcggttattgatgcgctgtgcaaggccagagccatggacaaggcagagtatttccttggtcagatggttgatgatggtgtcgtacctgataatgtgacatataatagcctcatccatggatattccttttcaggccac

SEQ ID NO: 2264 - DNA, 1557 bp, Triticum aestivum
  source 1..1557: mol_type = genomic DNA
atgtcgctgctccgtctccgcctccgcctccatgcccgccgctcctactccacctcgcatcccccacgcagccagggctgggatccccacgccgccttcgctgctgccacggagcgcgcgcgatctggcaatctcacctcggaggacgcacacaagctgttcgaccaattgctcctgcaggctaatccggtcaacatgcgccttcccaacgaccttctcaccgccctggctcgcgcgcctgcgttcgcagcctgcagcaacggccccgccctcgccgtcgccctcttcagccgtttgtcccaaggtgcccgccaacgggtggtgcagccaacggcctgcacccacggcatcctcatggactgctgctgcaacgcacaccgcctggatctggcgctcgccttcttcgcccgtctcctcaggacgggactcaaggcaggcgtcatagaagtcaacactcttctcaagggactctgccgcgcaaagcgggctcatgaggctctggacattctgcttcacaggatgcctgagctgggctgcacccccaacgtggtggcatataccacggtcatccacggcttctttaaggaaggccaagtaagcaaggcatgcaatctattccatgaaatggcgctgcagggcgttacacctgatgtggtgacatataactcggttattgatgcgctgtgcaaggccagagccatggacaaggcagagtatttccttggtcagatggttgatgatggtgtcgtacctgataatgtgacatataatagcctcatccatggatattccttttcaggccactggaaggaggctgttagggtattcaaacagatgacaagtcggagggttacagcagatgtgcatacttacaacatgtttatgacctttctttgcaaacatggaagaagcaaagaagctgcaggaatttttgataccatggctatcaagggcctgaaacctgacaacgtttcatatgctattctccttcatgggtatgccaccgaaggatgcttagttgatatgattaatctcttcaattcaatggaaagagattgtattctacctgactgtcgtatcttcaacatactgattaatgcatatgctaaatctgggaagcttgataaggctatgcttatcttcaatgaaatgcagaaacaaggagtgagtccaaatgcagttacatattcaactgtaatagatgcattttgcaaaaagggtcagttggacgatgctatgataaagtttaatcagatgattgatacaggaatacgacagggcacaactgtttatggtttttgtacacacggcgatttggtgaaagcaaaggaattgcttactgaaatgatgaacaaaggtatacctcctcctgatattaagttcttccattcaatcatgcagaaccttggcacagaaggaagggtaatagaagcacgggatgtccttggcttgatagcgcacataggtatgaggcctaatgtttgcacatttaatatactgagcggtggatattgcctttcggcaagatggaggatgcctcaaaaatatttgatgata

SEQ ID NO: 2265 - DNA, 738 bp, Triticum aestivum
  source 1..738: mol_type = genomic DNA
atgacaagtcggagggttacagcagatgtgcatacttacaacatgtttatgaactttctttgcaaacatggaagaagcaaagaagctgcaggaatttttgataccatggctatcaagggcctgaaacctgacaacgtttcatatgctattctccttcatgggtatgccaccgaaggatgcttagttgatatgattaatctcttcaattcaatggaaagagattgtattctacctgactgtcgtatcttcaacatactgattaatgcatatgctaaatttgggaagcttgataaggctatgcttatcttcaatgaaatgcagaaacaaggagtgagtccaaatgcagttacatattcaactgtaatagatgcattttgcaaaaagggtcagttggacgatgctatgataaagtttaatcagatgattgatacaggaatacgacagggcacaactgtttatggttctctaatccagggtttttgtacacacggcgatttggtgaaagcaaaggaattggttactgaaatgatgaacaaaggtatacctcctcctgatattaagttcttccattcaatcatgcagaaccttggcacagaaggaagggtaatagaagcacgggatgtccttggcttgatagcgcacataggtatgaggcctaatgtttgcacatttaatatactgagcggtggatattgcctttcggcaagatggaggatgcctcaaaaatatttgatgata

SEQ ID NO: 2266 - DNA, 1659 bp, Triticum aestivum
  source 1..1659: mol_type = genomic DNA
atggtgagcatcggcgagcatgctcgtcctcctaactctgctttccttcttcctaatcccagttcatgcccaggttgcgtcggtgcggtggggggcgagcggcaccggcgtcctctaggtcctctgccattaccagattcttccagatccataggtggagctatgagccgccgcgccgtccccgctggcaggcgcatcttggagcagaacatcaaggcccggtaccgggctggagccattggcaccgacgatgcactccacctgtttgacgaattgctccaggttgcctggccctcctcgatcgccaccatcaactgcctcctcattgtcgtcggccgtgattgccctgcgctcgccgtctccctcttcaaccacatcgcaagagccaaggtggcgccccacaatatcacctacggcattctagtcgactgctgcagccgtgctggccgcttggaccttggcttcgctgccatgggccacatcgttaagacgggatttgcggcaggatccgttatctctttcagccacctgctcagggccgtctgtgcggagaagaagaccagctacggaatggacatcgtgctccgaattatgcctgagcttaactgcataccggatgtttactcctacagcattcttttcaagggcctctgcaacgagaagagaagccaagaggctctcgagctgattcacgtgatggttgagcacggaggtagctgccaacctaatctggtctcatacaacaccgtaattgatggcttgttgaaagagggtgaggtgggcaaggcttacagcctattttgtgaaatggtacagagcgggattttggcaaatattgtgacctacaactcaatcatctctggcatgtgcaaagaggtggaacgggttttcgagcacatgtctataaatggtgttcaaccaaatatgataacttacaatatacagatggattatcttcgcaagagcggaagatgcgcggaagctaggaagatctttgattctatggtcagtttgggccaaaaaccgtatgttactacctacagtattctgcttaatggttatgttatggaaaaatcatttcatgatatgcattgtctccttgatttgatggtagaaaatggtatcttaccagatcatcatgtctacaacatactcatatctgcatatgctaaagaggaaatggcaagtgaggtaatgcatatatttacaaaaatgcggcagcaaggattgaaccctagtgttgcggactatggagcggtaataaacttgcattccagtattggcagaatggatgatgctatgccccaattcaatcaaatgatagccgaaggattagctcctgatatcatagttttcaacccccttattagtggtttttgtacttgtggcaaatgggagaaggttcatgaactattttctgaaatgttgaatcgcggcacctatcctgataccgtgttcttcaccacaattatggaccgcctttgcaaaaatggaagggttatggaagcccaagatatgtttgacctgatggtacacgtgggtgttaagcctaatgttcatacttatgccacattgatgcatgggtactttttcgttaggaagatggatgaagtgaggaagttacttggcaatatgctctcaattggctcgaaaccggat

SEQ ID NO: 2267 - DNA, 1659 bp, Triticum aestivum
  source 1..1659: mol_type = genomic DNA
atggtgagcatcggcgagcatgctcgtcctcctaactctgctttccttcttcctaatcccagttcatgcccaggttgcgccggtgcggtggggggcgagcggcgccggcgtcctctgggtcctctgccactaccagattcttccagatccataggtggagctatgagccgccgcgccgtccccgctggcaggcgcatcttggagcagaacatcaaggcccggtaccgggctggagccattggcaccgacgatgcactccacctgtttgacgaattgctccaggttgcctggccctcctcgatcgccgccatcaactgcctcctcattgtcgtcggccgtgattgccctgcgctcgccgtctccctcttcaaccacatcgcaagagccaaggtggcgccccacaatatcacctacggcattctagtcgactgctgcagccgtgctggccgcttggaccttggcttcgctgccatgggccacatcgttaagacgggatttgcggcaggatccgttgtctctttcagccacctgctcagggccgtctgtgcgaagaagaagacaagctacggaatggacatcgtgctccgaattatgcctgagcttaactgcataccggatgtttactcctacagcattcttttcaagggcctctgcaacgagaagagaagccaagaggctctcgagctgattcacgtgatggttgagcacggaggtagctgccaacctaatctggtctcatacaacaccgtaattgatggcttgttgaaagagggtgaggtgggcaaggcttacagcctattttgtgaaatggtacagagcgggattttggcaaatattgtgacctacaactcaatcatctctggcatgtgcaaagaggtggaacgggttttcgagcacatgtctataaatggtgttcaaccaaatatgataacttacaatatacagatggattatctttgcaagagcggaagatgcgcggaagctaggaagatctttgattctatggtcagtttgggccaaaaaccgtctgttactacctacagtattctgcttcatggttatgttatggaaaaatcatttcatgatatgcattgtctccttgatttgatggtagaaaatggtatctcaccagatcatcatgtctacaacatactcatatctgcatatgctaaagaggaaatggcaagtgaggtaatgcatatatttacaaaaatgcggcagcaaggatcgaaccctagtgttgcggactatggagcggtaataaacttgctttccagtattggcagaatggatgatgctatgtcccaattcaatcaaatgatagccgaaggattagctcctgatatcatagttttcaacccccttattagtggtttttgtacttgtggaaaatgggagaaggttcatgaactattttctgaaatgttgaatcgcggcacctatcctgataccgtgttcttcaccacaattatggaccgcctttgcaaaaatggaagggttatggaagcccaagatatgtttgacctgatggtacacgtgggtgttaagcctaatgttcatacttatgccacattgatgcatgggtactttttcgttaggaagatggatgaagtgaggaagttacttggcaatgtgctctcaattggctcgaaaccggat

SEQ ID NO: 2268 - DNA, 1659 bp, Triticum aestivum
  source 1..1659: mol_type = genomic DNA
atggtgagcatcggcgagcatgctcgtcctcctaactctactttccttcttcctaatcccagttcatgcccaggttgcgccggtgcggtggggggcgagcggcaccggcgtcctctgggtcctctgccattaccagattcttccagatccataggtggagctatgagccgccgcgccgtccccgctggcaggcgcatcttggagcagaacatcaaggcccggtaccgggctggagccattggcaccgacgatgcactccacctgtttgacgaattgctccaggttgcctggccctcctcgatcgccgccatcaactgcctcctcattgtcgtcggccgtgattgccctgcgctcgccgtctccctcttcaaccacatcgcaagagccaaggtggcgccccacaatatcacctacggcattctagtcgactgctgcagccgtgctggccgcttggaccttggcttcgctgccatgggccacatcgttaagacgggatttgcggcaggatccgttgtctctttcagccacctgctcagggccgtctgtgcgaagaagaagacaagctacggaatggacatcgtgctccgaattatgcctgagcttaactgcataccggatgtttactcctacagcattcttttcaagggcctctgcaacgagaagagaagccaagaggctctcgagctgattcacgtgatggttgagcacggaggtagctgccaacctaatctggtctcatacaacaccgtaattgatggcttgttgaaagagggtgaggtgggcaaggcttacagcctattttgtgaaatggtacagagcgggattttggcaaatattgtgacctacaactcaatcatctctggcatgtgcaaagaggtggaacgggttttcgagcacatgtctataaatggtgttcaaccaaatatgataacttacaatatacagatggattatctttgcaagagcggaagatgcgcggaagctaggaagatctttgattctatggtcagtttgggccaaaaaccgtctgttactacctacagtattctgcttcatggttatgttatggaaaaatcatttcatgatatgcattgtctccttgatttgatggtagaaaatggtatctcaccagatcatcatgtctacaacatactcatatctgcatatgctaaagaggaaatggcaagtgaggtaatgcatatatttacaaaaatgcggcagcaaggatcgaaccctagtgttgcggactatggagcggtaataaacttgctttccagtattggcagaatggatgatgctatgtcccaattcaatcaaatgatagccgaaggattagctcctgatatcatagttttcaacccccttattagtggtttttgtacttgtggaaaatgggagaaggttcatgaactattttctgaaatgttgaatcgcggcacctatcctgataccgtgttcttcaccacaattatggaccgcctttgcaaaaatggaagggttatggaagcccaagatatgtttgacctgatggtacacgtgggtgttaagcctaatgttcatacttatgccacattgatgcatgggtactttttcgttaggaagatggatgaagtgaggaagttacttggcaatgtgctctcaattggctcgaaaccggat

SEQ ID NO: 2269 - DNA, 1659 bp, Triticum aestivum
  source 1..1659: mol_type = genomic DNA
atggtgagcatcggcgagcatgctcgtcctcctaactctgctttccttcttcctaatcccagttcatgcccaggttgcgtcggtgcagtggggggcgagcggcaccggcgtcctctgggtcctctgccattaccagattcttccagatccataggtggagctatgagccgccgcgccgtccccgctggcaggcgcatcttggagcagaacatcaaggcccggtaccgggctggagccattggcaccgacgatgcactccacctgtttgacgaattgctccaggttgcctggccctcctcgatcgccgccatcaactgcctcctcattgtcgtcggccgtgattgccctgcgctcgccgtctccctcttcaaccacatcgcaagagccaaggtggcgccccacaatatcacctacggcattctagtcgactgctgcagccgtgctggccgcttggaccttggcttcgctgccatgggccacatcgttaagacgggatttgcggcaggatccgttgtctctttcagccacctgctcagggccgtctgtgcgaagaagaagacaagctacggaatggacatcgtgctccgaattatgcctgagcttaactgcataccggatgtttactcctacagcattcttttcaagggcctctgcaacgagaagagaagccaagaggctctcgagctgattcacgtgatggttgagcacggaggtagctgccaacctaatctggtctcatacaacaccgtaattgatggcttgttgaaagagggtgaggtgggcaaggcttacagcctattttgtgaaatggtacagagcgggattttggcaaatattgtgacctacaactcaatcatctctggcatgtgcaaagaggtggaacgggttttcgagcacatgtctataaatggtgttcaaccaaatatgataacttacaatatacagatggattatctttgcaagagcggaagatgcgcggaagctaggaagatctttgattctatggtcagtttgggccaaaaaccgtctgttactacctacagtattctgcttcatggttatgttatggaaaaatcatttcatgatatgcattgtctccttgatttgatggtagaaaatggtatctcaccagatcatcatgtctacaacatactcatatctgcatatgctaaagaggaaatggcaagtgaggtaatgcatatatttacaaaaatgcggcagcaaggatcgaaccctagtgttgcggactatggagcggtaataaacttgctttccagtattggcagaatggatgatgctatgtcccaattcaatcaaatgatagccgaaggattagctcctgatatcatagttttcaacccccttattagtggtttttgtacttgtggaaaatgggagaaggttcatgaactattttctgaaatgttgaatcgcggcacctatcctgataccgtgttcttcaccacaattatggaccgcctttgcaaaaatggaagggttatggaagcccaagatatgtttgacctgatggtacacgtgggtgttaagcctaatgttcatacttatgccacattgatgcatgggtactttttcgttaggaagatggatgaagtgaggaagttacttggcaatgtgctctcaattggctcgaaaccggat

SEQ ID NO: 2270 - DNA, 1659 bp, Triticum aestivum
  source 1..1659: mol_type = genomic DNA
atggtgagcatcggcgagcatgctcgtcctcctaactctgctttccttcttcctaatcccagttcatgcccaggttgcgtcggtgcggtggggggcgagcggcaccggcgtcctctgggtcctctgccattaccagattcttccagatccataggtggagctatgagccgccgcgccgtccccgctggcaggcgcatcttggagcagaacatcaaggcccggtaccgggctggagccattggcaccgacgatgcactccacctgtttgacgaattgctccaggttgcctggccctcctcgatcgccgccatcaactgcctcctcattgtcgtcggccgtgattgccctgcgctcgccgtctccctcttcaaccacatcgcaagagccaaggtggcgccccacaatatcacctacggcattctagtcgactgctgcagccgtgctggccgcttggaccttggcttcgctgccatgggccacatcgttaagacgggatttgcggcaggatccgttgtctctttcagccacctgctcagggccgtctgtgcgaagaagaagacaagctacggaatggacatcgtgctccgaattatgcctgagcttaactgcataccggatgtttactcctacagcattcttttcaagggcctctgcaacgagaagagaagccaagaggctctcgagctgattcacgtgatggttgagcacggaggtagctgccaacctaatctggtctcatacaacaccgtaattgatggcttgttgaaagagggtgaggtgggcaaggcttacagcctattttgtgaaatggtacagagcgggattttggcaaatattgtgacctacaactcaatcatctctggcatgtgcaaagaggtggaacgggttttcgagcacatgtctataaatggtgttcaaccaaatatgataacttacaatatacagatggattatctttgcaagagcggaagatgcgcggaagctaggaagatctttgattctatggtcagtttgggccaaaaaccgtctgttactacctacagtattctgcttcatggttatgttatggaaaaatcatttcatgatatgcattgtctccttgatttgatggtagaaaatggtatctcaccagatcatcatgtctacaacatactcatatctgcatatgctaaagaggaaatggcaagtgaggtaatgcatatatttacaaaaatgcggcagcaaggatcgaaccctagtgttgcggactatggagcggtaataaacttgctttccagtattggcagaatggatgatgctatgtcccaattcaatcaaatgatagccgaaggattagctcctgatatcatagttttcaacccccttattagtggtttttgtacttgtggaaaatgggagaaggttcatgaactattttctgaaatgttgaatcgcggcacctatcctgataccgtgttcttcaccacaattatggaccgcctttgcaaaaatggaagggttatggaagcccaagatatgtttgacctgatggtacacgtgggtgttaagcctaatgttcatacttatgccacattgatgcatgggtactttttcgttaggaagatggatgaagtgaggaagttacttggcaatgtgctctcaattggctcgaaaccggat

SEQ ID NO: 2271 - DNA, 1530 bp, Triticum aestivum
  source 1..1530: mol_type = genomic DNA
atgatgtccgagctcggctgtgtgcctaatgccttctcatactccattgttctgaagggcttatgcgacaatagcatgtgtcagcgggcgctcgagctgctccagatgctggtggaaaaagaaggtgcctgctctctcaatgtagtggcatatagcacagtcatccatggtttctttaaggaaggcgaaaccagcaaggcgtgcaatctattcgatgaaatgatacagcaagggattgtgcctgatgtggtgacatatagctcaattattgatgcgttgtgcaaggccagggcaatggacaaatcagagctagtccttcgtcagatggttgctaatggtgctcaacccaatgaagtgacatataattgcatgatccatggatattccacatctgggcggtggaaagaggctgttaaattgtttagagaaatgaaaagccggggccttataccagatatttttacttgcaactccttaatgacttaccattgcaagcatggaagaagcaaagaagctgcagaatttttttattcgatgacagcaaagggccacaaaccggatatcgtctcataccgtattttgcttcatgggtatgctactgaaggatgctttcctgatatgattgatgtctttaattcaatggaaaacaatggtattgcagccgactgccatgttttcaacatattaattgatgcatattctaaacgtggaatgatggatgaaactatgctgataacaagtaaaatgcaggaacgcagagtgaatcctgatatagtcacctattccagcataatagctggactttccagattgggtaggctgactgaggccatggaaaaattcaatcagatgattgccttgggagtacaaccgaacaaagttgtttatcacgcgttgattcagggtttttgcatagatggtgatttggctaaagctaagcagttggtttctgaaatgatgaacagaggtattcctcgtcctaacatttcgttctttagttcagtaataaagagtctctgccaagaaggaagggttatggatgcacatgatatctttgacttggttatagacatgggtgagaggcctgatgacattttacttaattcactgattgacggatactgcttagtcgggaagatggataaagcattaaaagtacttgatgtcatggaatcagttggtgttgagcctgatgttattacatacaatacacttgttaatggctattgtagaaatggaaggatcaatgatggtttgactctgttcagagatatggcgcgtaagagaattaaacctgacactgtgttcatattgcgtcataatggatgggttgtttcgttctgggagatctgtttctgttatggcgctgctagaaggagggcgcgagagggccggccgggggcctttttgcccacggccgggcaagagggaagggatttccttcttaattcttgcttgattagattgatacatctcctctctttatatagagaggtttacttgactcccaagcaaggcttacttgacccc

SEQ ID NO: 2272 - DNA, 1530 bp, Triticum aestivum; identical to SEQ ID NO: 2271
  source 1..1530: mol_type = genomic DNA

SEQ ID NO: 2273 - DNA, 1530 bp, Triticum aestivum
  source 1..1530: mol_type = genomic DNA
atgatgtccgagctcggctgtgtgcctaatgccttctcatactccattgttctgaagggcttatgcgacaatagcatgtgtcagcgggcgctcgagctgctccagatgctggtggaaaaagaaggtgcctgctctctcaatgtagtggcatatagcacagtcatccatggtttctttaaggaaggcgaaaccagcaaggcgtgcaatctattcgatgaaatgatacagcaagggattgtgcctgatgtggtgacatatagctcaattattgatgcgttgtgcaaggccagggcaatggacaaatcagagctagtccttcgtcagatggttgctaatggtgctcaacccaatgaagtgacatataattgcatgatccatggatattccacatctgggcggtggaaagaggctgttaaattgtttagagaaatgaaaagccggggccttataccagatatttttacttgcaactccttaatgacttaccattgcaagcatggaagaagcaaagaagctgcagaatttttttattcgatgacagcaaagggccacaaaccggatatcgtctcataccgtattttgcttcatgggtatgctactgaaggatgctttcctgatatgattgatgtctttaattcaatggaaaacaatggtattgcagccgactgccatgttttcaacatattaattgatgcatattctaaacgtggaatgatggatgaaactatgctgataacaagtaaaatgcaggaacgcagagtgaatcctgatatagtcacctattccagcataatagctggactttccagattgggtaggctgactgaggccatggaaaaattcaatcagatgattgccttgggagtacaaccgaacaaagttgtttatcacgcgttgattcagggtttttgcatagatggtgatttggctaaagctaagcagttggtttctgaaatgatgaacagaggtattcctcgtcctaacatttcgttctttagttcagtaataaagagtctctgccaagaaggaagggttatggatgcacatgatatctttgacttggttatagacatgggtgagaggcctgatgacattttacttaattcactgattgacggatactgcttagtcgggaagatggataaagcattaaaagtacttgatgtcatggaatcagttggtgttgagcctgatgttattacatacaatacacttgttaatggctattgtagaaatggaaggatcaatgatggtttgactctgttcagtgatatgccgcgtaagagaattaaacctgacactgtgttcatattgcgtcataatggatgggttgtttcgttgtgggagatctgtttctgttatggcgctgctagaaggagggcgcgagagggccggccgggggcctttttgcccacggccgggcaagagggaagggatttccttcttaattcttgcttgattagattgatacatctcctctcattatatagagaggtttacttgactcccaagcaaggcttacttgacccc

SEQ ID NO: 2274 - DNA, 1530 bp, Triticum aestivum
  source 1..1530: mol_type = genomic DNA
atgatgtccgagctcggctgtgtgcctaatgccttctcatactccattgttctgaagggcttatgcgacaatagcatgtgtcagcgggcgctcgagctgctccagatgctggtggaaaaagaaggtgcatgctctctcaatgtagtggcatatagcacagtcatccatggtttctttaaggaaggcgaaaccagcaaggcgtgcaatctattcgatgaaatgatacagcaagggattgtgcctgatgtggtgacatatagctcaattattgatgcgttgtgcaaggccagggcaatggacaaatcagagctagtccttcgtcagatggttgctaatggtgctcaacccaatgaagtgacatataattgcatgatccatggatattccacatctgggcggtggaaagaggctgttaaattgtttagagaaatgaaaagccggggccttataccagatatttttacttgcaactccttaatgacttaccattgcaagcatggaagaagcaaagaagctgcagaatttttttattcgatgacagcaaagggccacaaaccggatatcgtctcataccgtattttgcttcatgggtatgctactgaaggatgctttcctgatatgattgatgtctttaattcaatggaaaacaatggtattgcagccgactgccatgttttcaacatattaattgatgcatattctaaacgtggaatgatggatgaaactatgctgataacaagtaaaatgcaggaacgcagagtgaatcctgatatagtcacctattccagcataatagctggactttccagattgggtaggctgactgaggccatggaaaaattcaatcagatgattgccttgggagtacaaccgaacaaagttgtttatcacgcgttgattcagggtttttgcatagatggtgatttggctaaagctaagcagttggtttctgaaatgatgaacagaggtattcctcgtcctaacatttcgttctttagttcagtaataaagagtctctgccaagaaggaagggttatggatgcacatgatatctttgacttggttatagacatgggtgagaggcctgatgacattttacttaattcactgattgacggatactgcttagtcgggaagatggataaagcattaaaagtacttgatgtcatggaatcagttggtgttgagcctgatgttattacatacaatacacttgttaatggctattgtagaaatggaaggatcaatgatggtttgactctgttcagtgatatgccgcgtaagagaattaaacctgacattgtgttcatattgcgtcataatggatgggttgtttcgttctgggagatctgtttctgttatggcgctgctagaaggagggcgcgagagggccggccgggggcctttttgcccacggccgggcaagagggaagggatttccttcttaattcttgcttgattagattgatacatctcctctcattatatagagaggtttacttgactcccaagcaaggcttacttgacccc

SEQ ID NO: 2275 - DNA, 1530 bp, Triticum aestivum; identical to SEQ ID NO: 2271
  source 1..1530: mol_type = genomic DNA

SEQ ID NO: 2276 - DNA, 1407 bp, Triticum aestivum
  source 1..1407: mol_type = genomic DNA
atgtccaacctccgcctcctccgccgcagctcctcctccatgtccaccaccaggtcgccactctcacgggtctggtccccccattcggcctttgccgcggccacagagcgcgtacgcaccgggacgctcagccaagacgatgcacaccacctgttcgacgaattgctgcggcaggccaccccggtccacgagcgctccctcaacagcttcctcgccgccctcgcgcatgctacgtcctctgccgcctgcatcagagatggtcgcgccctcgccatcgccctcttcaaccgcgtgtgtcgagagcaatccggcccgcgggtggtgcctctcacagtccacacgtacaacatcctcatggactgctgctgccgcgcgtctcgcccggacctaggtcttgccttcttcgctcgcctcctcaggacaggcctgaagacaaacgagatcaccgccaacaccttcctcaagtgcctctgctacgcaaaacggacggatgaggctctgaacgtgctgcttcataggatgtccgagctcggctgtgtgcctgatgccatctcatacaacattgttctgaagagcttatgtgaagatagcatgagtcagtgggcgctcgacctcctccagatgatggcgaaagaaggaggtggctgctcccccaacgtggtggcgtatagcacggtcatccatggcttttttaaggaaggtgaaacaggcaaggcatgcaatctgttccatgaaatgatgcaccaaggtgttgagcccagtgtgtggacatatagctcaatcattgatgcattgtgcaaggccagagcaatggacaaggctgagctagtgcttcagcagatggttaacaaaggtgttcaacccaataatgtgacatataattgcatgatccatggatattccacatctgggcagtggaaagaggctgctaaattgcttagagaaatgaaaagccgggaccttataccagatattgtcactcgcaactcgttcctggcctccctttgcaagcatgggagaagcaaggaagctgcagaatttcttgattccatgactgccaagggccacaaaccagatatcgtatcataccgtattttgtttcatgggtgtgccagtgaaggatgcttcgctgatatgattgatctctttaattcaatggaaagcaacggtattgcagctgactgccatgttttcaacatattaattaatggatatgcaaaacgtggaatgacagaagaagctatgctgatatttactgaaatgcggggacaaggagtgagtccagatgtagtcacctattccattgtaatagccgcactttccagaatgggtaggctgaccgatgctattgagaaattcaatgagatgactgccttggaagtacagccggacacaactgtttattgt

SEQ ID NO: 2277 - DNA, 1407 bp, Triticum aestivum; identical to SEQ ID NO: 2276
  source 1..1407: mol_type = genomic DNA

SEQ ID NO: 2278 - DNA, 1407 bp, Triticum aestivum; identical to SEQ ID NO: 2276
  source 1..1407: mol_type = genomic DNA

SEQ ID NO: 2279 - DNA, 1407 bp, Triticum aestivum; identical to SEQ ID NO: 2276
  source 1..1407: mol_type = genomic DNA

SEQ ID NO: 2280 - DNA, 1602 bp, Triticum aestivum
  source 1..1602: mol_type = genomic DNA
atgagccgccgctttccccctggagctatgagcagacgcatcttggagcggaaaattcaagatcggtaccatgccggacacattggcactcacgacgcactcaacctgttcgacgaattgatccaggttgctgggccttcctcggtccgcgccattaactgcctcctcaccgtcgtcggccgtgattgccctgcgctgggcgtctccctcttcaaccgtgttgcaagagccaaggtgcctccccacaatatcacctatagcattctagtcgattgctgctgccgtgctggccgcttggaccttggacacgctgccatgggacacgttattaagctgggatttgcagcagaagccatcgtcaatttcagccacctactcaaagccatctgcgccgagaagaagaccagctatgcaatggacatcgtactccggataatgcccgagtttaactgcataccggatgttttctcctacagcattcttttcaagggtctctgcaacgagaaaagaagccaagaggctctcgagctgattcacatcatggctgaggatggaggtagctgccaacctaatgtcgtgtcctataacaccgtacttgatggcttgttgaaagagggtgaggtgggcaaggcctacagcctattttgtgtcatgctacagaggggaatttcaccgaatgttgtgacctgcacttcaatcatctctggcatgtgcaaagttcatgcgatggacaaggcagaggaggttcttcaacagatgactaatagaggtattctgccaaatagtgccacatataatagtctgatacatggatattattcattaggacagtgcgaggaggtggatcgaattttcaaagaaatgtccagaaatggtgttcaaccagatattgtaacttataatatacagatggattatctttgcaagagcagaagatgcgcagaagctaggaagatttttgattccatggtcagtttgggccaaaaaccagatgttactacctacagcatactgcttcatgggtatgctatggaaaaatcttttcatgatatgctttgtctcattgatttgatggtaggtaatggtattgcaccaaatcattatgtctacaacatactcatatctgcatatgctaaagaagaaatggttgatgaagtaatgcatatatttagaaaaatgcggcagaaaggattgaaccctgatgcagtgagctatggaacagtaatacacttactttccaggattggtcgaatggatgatgctatgtgccagttcgctcaaatcataactgaagggttagctcctgatatcatagttttcaactcccttattagtggtttctgttcttgtggcaaatgggagaaggttcatgaactattttctgagatgttggattgcggcatctgtcccgacagagtgttcttcaacactgttatggatcacctttgcaaaaatggaagggttatggaagcccaagatgtgttcgacctgatggtacacatgggtgtgaagccttttgtccgtgattacaacacactgatacatggatactgtttagttggtaagatggatgaagggaggaagttacttgacaatatgttc

SEQ ID NO: 2281 - DNA, 1551 bp, Triticum aestivum
  source 1..1551: mol_type = genomic DNA
atgcgcccatgccggacgcctctcctcgactccacctcgcggctgtccgtgctcctcctcgaccacctccaccgcaatcgcccctcccctccgccctcaccctcgccgccgtcagccttctggtctcccatcgccgcattcgccgctgccacgaagcgcgcccgagccgggacgctcagccctgaggacgcacaccacctgttcgacgaattgctacgccagtccatcccggtccccaaccgcttcctgaacagcttccttgccgccctcgcccgtgccccagcctccgacgcctgcggagatggccccgccctcaccgtcgccctcttcaaccgcctgtgccgagaagaagccggcccttgtgtggcgccgcccactatctataccaacaacattctaatggacagctgctgccgcgtgggtcgcccggaccttgggcttgctgtcttcggccgcctactcaagtcaggcctcaaggcagaccagatcactgccagcagcctcctcatgtgcctctgcgatgtaggacggacaaacgaggctgtggacgttctgcttcataggatctccgagctcggctgtgagcctaatgtcatcccatacaacatagttcttaagagcgtatgtgacagtagaaggagccagcaagctcttgacctgctccagatgatggcacaaagaggttgctgctcccctaatgtggtgtcatataacaccgtcattcatggcttatttaaggaaggtgaagtaagcatggcgtgctcattattctatgaaatgatgcggcaaagggttatgcctaatgtggtgacatatagatcgatgattggtgcgttgtgcaaggtcggggcaacggacaaggcaaagctggtccttggtcatatggttggtaatggttttcaaccagatatgtatacttggaactcattcatggcatctctttgcaagcagggaagaggcaaggaagctgcacaactttttgattacatggtcgccaagggccacaaacctgatgttgtcatgtactccactctgcttcatgggtatgctactgaaggatgcttcactgatatgattaatcactttaattcaatggaaggcaacggtattgtagctaacagccgtgtttttaacatactaatcgacgcatatgctaaacgtggaatgatgcatgaagctatgctcatatttactgaaatgcgggaacgaagagtgagtcctgatatattcacctatggaattataatagctgcactttgcagaatgggtaggctatctgatgctatggagaaaataaatgaaatggttgctacaggattacaaccgaacgaggctgtttactattccctaattcagggtttttgtacacatgatgatttggtcaaagctaaggagttggtttctgagatgatgaccaaaggtattcctcgtcctaacattgtgttcttcaattcggtaatagccagtctgtgcaaagaaggaagggttaaggatgcacacggtatctttgacttggctatgaacattggtgagaggcccgatttaattcac

SEQ ID NO: 2282 - DNA, 1008 bp, Triticum aestivum
  source 1..1008: mol_type = genomic DNA
atgctgctccacaggatgcccggcgacatgcctgatgtcatctcctactcagtaattatcaagagcttctgtgacaacgggaggagccaacgtgcacttgacctgctccggatgatgaccaaaaagggatctgaccactcccccaatgtggtttcatacacaataatcattggtggattaattaaggagggtgaactaagcaaagcatgcgctctattccatgaaatgatgcagcagggggttgtgcctgatgtggtgacgtatagctccattatcgatgggttgtgcaaagcaagagcattggacgaggcagaggtggtccttcgacaaatgattgatagcggtgttcgaccgaatgctgtgacatacggtagcctgatccatggatattccacttcaggccagtttgaagaggtagttaggttattggaagaaatgagaggtcaaggtgtcgaaccaaatctttttactcacaacacagtcatggactacctttgcaagcatggaagaacgaaagaagctgcagaacttttttattccatggctgagaagggccataaacctaatatggtctcattctctattatgcttcatgggtacgctatagaaggatcccttgctgaaatgactgatctctgtgagctgatggcaagagacggtatcgtacccaacatctgtattttcaacatactgattaatgcatatgctaagtgtggaattatggatgtggctatgcttttcttcgaagacatgttgaagcagggagtgacccctgatgaagtcacatatttagctgtaatagctgggtattgcagaatgggcaggatggatgatgctatcaagaaattcaatgagatgattgatatgggagtaccacatagcttaactatttacaggtgcatgattcatggttattttcgtcatggcaatttcttgaaagcgaaggaattgattactgaaatgaagaacaagggtattcgtccttgtccgcgaaaaaagccaaagaat

SEQ ID NO: 2283 - DNA, 1593 bp, Triticum aestivum
  source 1..1593: mol_type = genomic DNA
atgaagttcagtgcagttccaagtttggttgagtgtctgacctccgccggtcatccaccctccagtggtttgtcgtcgccgacacgctcccacattcgccactgcaggaaggagcaagacctcccacgtctggcccggttgtcctccagctccggctcctcacaggccaaccagctgctaaacaaactcaaggatcatctgggctctgggatgctcaggccggagctcgcgcaccaactgttcgacaaattgttccctcaaaccgttccagtatcagcagatgcactcaatgtcctattttctgccctcgcgtgtgggctgccctctgccgcctgcaacgatggacctgccctcgccattgctctcttcaaacacatggcacgaacaagatgccgccaggtgatggcacccaccaatcacacttacaacacactaattgagtgctgccacatggcgcgccgccctgacataggccccgccttcttcggcctcctcctcaagacaggcatcatggtagatgtcttcaccttcaacagcttattgaagtgcctctgtgacatgaagcaaacagatgaggctctaggcgtgctgctccacaggatgcccggcgacatgcctgatgtcatctcctactcagtaattatcaagagcttctgtgacaacgggaggagccaacgtgcacttgacctgctccggatgatgaccaaaaaacgatctgaccactcccccaatgtggtttcatacacaataatcattgatggattaattaaggagggtgaactaagcaaagcatgcgctctattccatgaaatgatgcagcagggggttgtgcctgatgtggtgacgtatagctccattatcgatgggttgtgcaaggcaagagcattggacgaggcagatgtggtccttcgacaaatgattgatagcggtgttcgaccgaatgttgtgacatacggtagcctgatccatggatattccacttcaggccagtttgaagaggtagttaggttattggaagaaatgagaggtcagggtgtcgaaccaaatctttttactcacaacacagtcatggactacctttgcaagcatggaagaacgaaagaagctgcagaacttttttattccatggctgagaagggccataaacctaatatggtctcattctctattatgcttcatgggtacgctatagaaggatcccttgctgaaatgactgatctctgtgagctgatggcaagagacagtatcgtacccaacatctgtattttcaacatactgattaatgcatatgctaagtgtggaattatggatgtggctatgcttttcttcgaagacatgttgaagcagggagtgacccctgatgaagtcacatatttagctgtaatagctgggtattgcagaatgggcaggatggatgatgctatcgagaaattcaatgagatgattgatatgggagtaccacatagcttaactatttacaggtgcatcattcatggttattttcgtcatggcaagttcttgaaagcgaaggaattgattactgaaatgaagaacaagggtattcgtccttgtccgcgaaaaaagccaaagaat

SEQ ID NO: 2284 - DNA, 1008 bp, Triticum aestivum; identical to SEQ ID NO: 2282
  source 1..1008: mol_type = genomic DNA

SEQ ID NO: 2285 - DNA, 1008 bp, Triticum aestivum; identical to SEQ ID NO: 2282
  source 1..1008: mol_type = genomic DNA

SEQ ID NO: 2286 - DNA, 1008 bp, Triticum aestivum; identical to SEQ ID NO: 2282
  source 1..1008: mol_type = genomic DNA

SEQ ID NO: 2287 - DNA, 1008 bp, Triticum aestivum; identical to SEQ ID NO: 2282
  source 1..1008: mol_type = genomic DNA

SEQ ID NO: 2288 - DNA, 1008 bp, Triticum aestivum; identical to SEQ ID NO: 2282
  source 1..1008: mol_type = genomic DNA

SEQ ID NO: 2289 - DNA, 1509 bp, Triticum aestivum
  source 1..1509: mol_type = genomic DNA
atgacaaatcggagtgttacaccagatgtgtgtacttacaacttgttgatgacctccctttacaagaatggaaatagcaaagaagctgcacaattgttttattcaatggccacgaagggcctgaaacctgacaccgtttcatatgctattctccttcatgggtatgccactgaaggatgcttggttgacatgatcaatctcttcaattcaatggcaacagactgtattctacctaactgtcatatcttcaacatactgatttatgcatatgctaaatctgggaagcttgataaggctatgcttatatttaaagatatgcagaaacaaggagtgagtccagatgcagtcacatattcaaccgtaatacatgcattttgcaaaaagggtaggttggatgatgctgtgacaaagtttaatcagatgattgatacaggagtacaaccggaagcatctgcttatcgttccctaatccagggtttttgtacacatggcgatttggtgaaagcaaaggaatatgttactgaaatgatgaagaaaggtatgcttcctcctgatattatgttcttcagttcaatcatgcagaaactatgcacagaaggaagggtaatagaagcacgagatatccttgacttgatagtgcgcattggtatgaggcctaatgttttcatatttaatatactgatcggtgggtactgcctaggctgcaagatggaggatgcaacaaaaatgtttgaggatatggtgtcatttggtttagaaccttgtaatattacgtatggtatacttattaatggctattgcaaaagtagaaggattgatgatgggcttattctgttccaagagatgctgcacaagggacttaaacctacaacttttaattataatgtcatactggatgggttatttctggctggacgaactattgctgcaaaggaaaagtttgatgagatggttgaatctggagtaagtgtgtgcactgatacatattcgatagttcttgctggactttgcagaaataattgctttagcgaagtaatcatgctgttccagaagttaagggcaatgaacatgaaattcaatattagaattgtcactatcattattgatgccttctacaaggttcggcgaaaccaagaagctaaggatttgtttgctgcaataccatccaatggtttggtagctaatgttgttacctacagcataatgatgaaaaatcttataaaagaaggttcagtggaagaagctgacactctctttttatcaatggagaagagcggctgtactgcaaactcttggatgttaaatcatattatcagaaggttactggaaagaggagagatagtcaaggctggaaattatatatcgaaagttgatgcaaagagctactcacttgaagctaaaactgtttcgctgctgatctccctcttttcagggaaagggaaatatagagaacacataaaattgctccctatgaagtatcagtttctcgaagaagcagccacagttgaa

SEQ ID NO: 2290 - DNA, 915 bp, Triticum aestivum
  source 1..915: mol_type = genomic DNA
atgacaaatcggagtgttacaccagatgtgtgtacttacaacttgttgatgacctccctttacaagaatggaaatagcaaagaagctgcacaattgttctattcaatggccacgaagggcctgaaacctgacaccgtttcatatgctattctccttcatgggtatgccactgaaggatgcttggttgacatgatcaatctcttcaattcaatggcaacagactgtattctacctaactgtcatatcttcaacatactgatttatgcatatgctaaatctgggaagcttgataaggctatgcttatatttaaagatatgcagaaacaaggagtgagtccagatgcagtcacatattcaaccgtaatacatgcattttgcaaaaagggtaggttggatgatgctgtgataaagtttaatcagatgattgatacaggagtacgaccggaagcatctgcttatcgttccctaatccagggtttttgtacacatggcgatttggtgaaagcaaaggaatatgttactgaaatgatgaagaaaggtatgcttcctcctgatattatgttcttcagttcaatcatgcagaaactatgcacagaaggaagggtaatagaagcacgagatatccttgacttgatagtgcgcattggtatgaggcctaatgttttcatgtttaatatactgatcggtgggtactgcctagtctgcaagatggaggatgcaacaaaaatgtttgaggatatggtgtcatttggtttagaaccttgtaatattacgtatggtatacttattaatggctattgcaaaaatagaaggattgatgatgggcttattctgttccaagagatgctgcacaagggacttaaacctacaacttttaattataatgtcatactggatgggttatttctggctgga

SEQ ID NO: 2291 - DNA, 900 bp, Triticum aestivum
  source 1..900: mol_type = genomic DNA
atgccccaactgggagttcaacctaatgtggtcatctacacctcaattatcgatgcactaagcaagtgcggagccatggacaaggcagaagtggtccttcagcaaatggttgatcaaggcattgaacccaacatcaggacatatactagcctgatacatggatattcagcttcgggtcagtggaaggcggcagctagagtattcaaggaaatggtaagtgttggtgttctaccaaatgctgtcactttgaactcatttatggattcactttgcaagcatagaaggacaaaggatgctagagatatttttgactccatggctgcaaagggccaaaaacctgacattttctcctactctattatgctaaatgggtatgctaaagaaggatacttcgaggatatgactgatctcttcaatttgatggtactgaatggtattgtacctaaccaccatattttcaacatactgatcaatgcatatgctaaacgtggactgatggatgaggctatgcacatgttcgaagtaatgaggcaacaaggagtaaacccaaatgtagttgactatgtagtagtaatggattcactttgcaaaatgggtaggatggatgctgctctggacaaatttactcagatggtcaatcaaggagtttcacctaacaaagctgtttaccaatgcctggttctgggttcttgctctcatggtcattttgtgaaagccaaggaattgatctctgaagcaattaatagaggtctgttttctaacagtgtgttcttctatcctgtaataaacgacctatgcaaagaaggaaaggtgaaggaggcacaggatatgtttgacttcattctaggtattggtcggcggcctgatgtgattatgtacaattcactgatggatggatat

SEQ ID NO: 2292 - DNA, 900 bp, Triticum aestivum; identical to SEQ ID NO: 2291
  source 1..900: mol_type = genomic DNA

SEQ ID NO: 2293 - DNA, 585 bp, Triticum aestivum
  source 1..585: mol_type = genomic DNA
atggctgcaaagggccaaaaacctgacattttctcctactctattatgctaaatgggtatgctaaagaaggatacttcgaggatatgactgatctcttcaatttgatggtactgaatggtattgtacctaaccaccatattttcaacatactgatcaatgcatatgctaaacgtggactgatggatgaggctatgcacatgttcgaagtaatgaggcaacaaggagtaaacccaaatgtagttgactatgtagtagtaatggattcactttgcaaaatgggtaggatggatgctgctctggacaaatttactcagatggtcaatcaaggagtttcacctaacaaagctgtttaccaatgcctggttctgggttcttgctctcatggtcattttgtgaaagccaaggaattgatctctgaagcaattaatagaggtctgttttctaacagtgtgttcttctatcctgtaataaacgacctatgcaaagaaggaaaggtgaaggaggcacaggatatgtttgacttcattctaggtattggtcggcggcctgatgtgattatatacaattcactgatggatggatat

SEQ ID NO: 2294 - DNA, 1296 bp, Triticum aestivum
  source 1..1296: mol_type = genomic DNA
atgacgacgctgctgccaagggtttccaccggtacacgacgaggcgagaggaagggtagcccccgatgccctctcagaaggccaggtggcacccacaggcgccaccgcgccggtgtcggccacagtccggatgtattcacctattcaactctagtatctgcactttgcagaatgggtaagctagctgatgctatggataagttcagtgagatgattggtacgggagtacaaccaggcacagttgtttatcactccctaattcagggtttctgtacacatggcgatttggtgaaagcaaaggagttggtatatgaaatgatgaacaaaggtagtccttgtccaaacattgcattcttcagttcaatagtagacagtctatgcaaagaaggaagggttatggatgcacaccatatctttgacttggttaaagacataggtgagagacctgacatcattatgtttaatacgctgattgacggatattgcctagtcggtgagatggagaaagcatgtggtgtatttgatgccatggtatcagctgtcgttgagcctgatgtcattacctatagtacacttgtcagtggatattgtaaaagtggaaggatcgatgatgggttgaatctgttcacagaaatgttgcataagaaagttaaacctacaactgttacatatggcaccatactggatgggttattttgtgctgggagatctgctgctgcaaagaaagtgttccatgagatgatcgaaagtggaataatggtgagcatttctacatataatataattcttggaggactttgtagaaataattgcgcagatgaagcgattgtcctattccagaaattgtgtgcaatgaatgtgaagttcaatatcacaacactcaataccatgcttaatgcattctacaaggttcaaagaagagaagaagctagtgatttgtttgctgcattaccagccagcgggttggtgcctaatgcttctacttacggagtaatgatacaaaatcttctaaaagaaggagcggtggaagaagctgacagtatgttctcatcaatggagaagagtggttgtgctcctagctctcgttttttaaattatatcatcagaacgttattggaaaaaggggagatagacaaggccggaaaatatatgtctaaagttgatgggaagactattttgcttgaagcttcaactacttcattgctgatgtccctcttttcaaggggaggcaaatatcaggagcacatactcttgctccctgcaaagtatcaactttttagtggagtgaaccacagt

SEQ ID NO: 2295 - DNA, 1296 bp, Triticum aestivum; identical to SEQ ID NO: 2294
  source 1..1296: mol_type = genomic DNA

SEQ ID NO: 2296 - DNA, 1296 bp, Triticum aestivum; identical to SEQ ID NO: 2294
  source 1..1296: mol_type = genomic DNA

SEQ ID NO: 2297 - DNA, 1296 bp, Triticum aestivum; identical to SEQ ID NO: 2294
  source 1..1296: mol_type = genomic DNA

SEQ ID NO: 2298 - DNA, 1248 bp, Triticum aestivum
  source 1..1248: mol_type = genomic DNA
atgcatatatatgctaaacgaggactgatagatgaagctgtgctcatacttactgaaatgcggggacacggactgagtccggatgtattcacctattcaactctagtatctgcactttgcagaatgggtaagctagctgatgctatggataagttcagtgagatgattggtacgggagtacaaccaggcacagttgtttatcactccctaattcagggtttctgtacacatggcgatttggtgaaagcaaaggagttggtatatgaaatgatgaacaaaggtagtccttgtccaaacattgcattcttcagttcaatagtagacagtctatgcaaagaaggaagggttatggatgcacaccatatctttgacttggttaaagacataggtgagagacctgacatcattatgtttaatacgctgattgacggatattgcctagtcggtgagatggagaaagcatgtggtgtatttgatgccatggtatcggctgtcgttgagcctgatgtcattacctatagtacacttgtcagtggatattgtaaaagtggaaggatcgatgatgggttgaatctgttcacagaaatgttgcataagaaagttaaacctacaactgttacatatggcaccataccggatgggttattttgtgctgggagatctgctgctgcaaagaaagtgttccatgagatgatcgaaagtggaataatggtgagcatttctacatataatataattcttggaggactttgtagaaataattgcgcagatgaagcgatcgtcctattccagaaatcgtgtgcaatgaatgtgaagttcaatatcacaacactcaataccatgcttaatgcattctacaaggttcaaagaagagaagaagctagtgatttgtttgctgcattaccagccagcgggttggtgcctaatgcttctacttacggagtaatgatacaaaatcttctaaaagaaggagcggtggaagaagctgacagtatgttctcatcaatggagaagagtggttgtgctcctagctctcgttttttaaattatatcatcagaacgttattggaaaaaggggagatagacaaggccggaaaatatatgtctaaagttgatgggaagactattttgcttgaagcttcaactacttcattgctgatgtccctcttttcaaggggaggcaaatatcaagagcacatactcttgctccctgcaaagtatcaactttttagtggagtgaaccacagt

SEQ ID NO: 2299 - DNA, 1296 bp, Triticum aestivum; identical to SEQ ID NO: 2294
  source 1..1296: mol_type = genomic DNA

SEQ ID NO: 2300 - DNA, 1296 bp, Triticum aestivum
  source 1..1296: mol_type = genomic DNA
atgacgacgctgctgccaagggtttccaccggtacacgacgaggcgagaggaagggtagcccccgatgccctctcagaaggccaggtggcacccacaggcgccaccgcgccggtgtcggccacagtccggatgtattcacctattcaactctagtatctgcactttgcagaatgggtaagctagctgatgctatggataagttcagtgagatgattggtacgggagtacaaccaggcacagttgtttatcactccctaattcagggtttctgtacacatggcgatttggtgaaagcaaaggagttggtatatgaaatgatgaacaaaggtagtccttgtccaaacattgcattcttcagttcaatagtagacagtctatgcaaagaaggaagggttatggatgcacaccatatctttgacttggttaaagacataggtgagagacctgacatcattatgtttaatacgctgattgacggatattgcctagtcggtgagatggagaaagcatgtggtgtatttgatgccatggtatcagctgtcgttgagcctgatgtcattacctatagtacacttgtcagtggatattgtaaaagtggaaggatcgatgatgggttgaatctgttcacagaaatgttgcataagaaagttaaacctacaactgttacatatggcaccatactggatgggttattttgtgctgggagatctgctgctgcaaagaaagtgttccatgagatgatcgaaagtggaataatggtgagcatttctacatataatataattcttggaggactttgtagaaataattgcgcagatgaagcgatcgtcctattccagaaattgtgtgcaatgaatgtgaagttcaatatcacaacactcaataccatgcttaatgcattctacaaggttcaaagaagagaagaagctagtgatttgtttgctgcattaccagccagcgggttggtgcctaatgcttctacttacggagtaatgatacaaaatcttctaaaagaaggagcggtggaagaagctgacagtatgttctcatcaatggagaagagtggttgtgctcctagctctcgttttttaaattatatcatcagaacgttattggaaaaaggggagatagacaaggccggaaaatatatgtctaaagttgatgggaagactattttgcttgaagcttcaactacttcattgctgatgtccctcttttcaaggggaggcaaatatcaggagcacatactcttgctccctgcaaagtatcaactttttagtggagtgaaccacagt

SEQ ID NO: 2301 - DNA, 675 bp, Triticum aestivum
  source 1..675: mol_type = genomic DNA
atggtatcgtacggaatggatgaggctatgcacatgttcgaagtaatgaggcaacaaggagtaaacccagatgtatttggctatcaaatcataatggattcactttgtaaaatgggtaagatggatgctgctctggacaaatttaatcagatggtcaatcaaggagtttcacctaacaaagctgtttaccaatgcctggttctgggttcttgctctcatggtgattttgtgaaagccaaggaattgatttctgaagcggttaatagaggtatgtgttctaacagtgtgttcttctatcctgtaataaacgacctttgcaaagaaggaaaggtaaaggaggcacaggatatgtttgacttcatcctaggtattggtcagcggcctgatgtgattatgtacacttcactgatggatggatattgccttgttggcaaggtggagaaagcactgagtgtactcgatgctatgaaatttgctggccttcaacctgatgatgttgtatatggtacacttcttaacagttactgtaaaattggaaggattgccgatggattgagccttttcaggaaatgtcactcagcggggttaagcccacgactattatatacaacattatactggatgggctgttttgctctgggagaacaggttctgcaaaggaaaaattccatacga

SEQ ID NO: 2302 - DNA, 675 bp, Triticum aestivum; identical to SEQ ID NO: 2301
  source 1..675: mol_type = genomic DNA

SEQ ID NO: 2303 - DNA, 1410 bp, Triticum aestivum
  source 1..1410: mol_type = genomic DNA
atggacttcaccgccacggacgtctttcagcactcgccctatggcgatatcctgaattcactaaagtctcyctctttgtcaggagagccctggccgaattgccaggccaagcgctcaaatgaggctttggacatgctgctccaccggacacctgaactacactgtgcgcctgatgtcttctcgtacaacatagtaatcaacggctgcttgaaagaaggtgaagtagacaaagcgtgcaatctcttccatgagatgccccaactgggagttcaacctgatgtggtgacctacacctcaatcatggacgcactaagcaagtccggagcaatggacaaggcagaagtgctccttcggcaaatggttgatcaaggaattgaacccaatatcaagacatatagctatctgatccatggatattctacttttggtcagtggaaggaggcacttagggtattcaaagaaatggcaagtcttggtgttgtaccagacgttgtcacgttgacctcattaatcgattccctttgcaagcacagaaggacaaaggaagctagagaaagttttgactctatggctgcaaagggcctgaaacctaatatcgtctcctactctactatgcttaatggttatgtcaaagaaggatcattcgaggatatgactgatctcttcaattcgatggtacggaatggtatcgtacctaaccaccatattttcaacatactgatcaatgcatatgctaaacgtggaggagtgawgkatgaggctatgcacatgttcgaagtaatgaggcaacaaggagtaaacccggatgtatttgactatcaaatcataatggattcactttgcaaaatgggtaggatggatgctgctctggacaaatttaatcagatggtcaatcaaggagtttcacctaacaaagctgtttaccaatgcctggttctgggttcttgctctcatggtcattttgtgaaagccaaggaattgatttctgaagtggttaatagaggtctgtgttctaacagtgtgttcttctatcctgtaataaacgrcctttgcaaagaaggaaaggtaaaggaggcacaggatatgtttgacttcatcctaggtattggtcagcggcctgatgtgattatgtacacttcactgatggatggatattgccttgttggcaaggtggagaaagcactgagtgtactcgatgctatgaaatttgctggccttcaacctgatgatgttgtatatggtacacttcttaacagttactgtaaaattggaaggattgccgatggattgagccttttcaggaaatgtcactcagcggggttaagcccacgactattatatacaacattatactggatgggctgttttgctctgggagaacaggttctgcaaaggaaaaattccatacga

SEQ ID NO: 2304 - DNA, 675 bp, Triticum aestivum; identical to SEQ ID NO: 2301
  source 1..675: mol_type = genomic DNA

SEQ ID NO: 2305 - DNA, 1527 bp, Triticum aestivum
  source 1..1527: mol_type = genomic DNA
atgggcgaggcggagcttgagccccgaggcggcggcctcggtctgcgtggcgacggcggccgctgcggccgcctgggcggtgtggtggtcgggcctgggcgcggtgctgctgccgtgccgggtgctcgcggtggaggatggggttggctcttcttcggtctgctcggcggccggcggcgtcgtcccggtggccaggggagcaggtccggtgggtggctcctccggcagcgtctccaggcctggcgtggagcggatccggtggtcagggacctacctacacaccaaggccatgcctcgcttctcctccaccacgccaatggcgccaccccgcctccgcctccgactcggctcccgccactcctcctccacctctcatccctcacgcatctgggatccccacgccgccttcgccgccgccgcagaccgcgcgcgctctggcaacctcaccgcggaggacgcacaccacctgttcgacgaattgctgcggcagggcaatcctgtccaggaccgccccctcaacaaacttctctccgccctcgcccgtgctccggcgtccgcggcctgcggcgacggcccgccctcgcggtcgccctcttcagccgcatatcccaaggtgcccgccgacgggtggcagagccaacggcctgcacttacggtatcctcatggactgctgcagccgtgcgtgctgcccggaactggcgcttgccttcttcgcccgtctactgaggtcggggctgagggtaggtgtcatagaagtccgcaccctcctcaagggcctctgccatgcaaagcgggcagaggaggccatggacgtgctgcttcacaggatgcccgagctgggctgcaccccgggcgtggtggcatataacactgtcatcaacggcttctttaaggaaggccaagtaggcaaggcgtgcagtctattccatggaatgccgcagcggggcgttttgcctgatgtagtgacatatacctctgttgtcgatgggctgtgcaaggccagagccatggacaaggcagagtatttccttcgtcagatggttgatagtggtgtcgtacctgataatgtgacatataatagcctcatccatggatattcctctttgggccatcagaaggaggctgttagggtgctgaaagagatgaatcggagggttacaccagatgtcattacctgcacctcactcatggccttcctttgcaagaatggaaaaagcaaggaagctgcagaaatttttgattcaatggccacgaagggcctgaaacatgacgccgtttcatatgctattctccttcatgggtatgccactgaaggatgcttggttgatatgattaatctcttcaattcgatggacagagactgtattctacctgacggtcgtatcttcaacatactgattaatgcatatgctaaatctgggaaccttgataaggctatgcttatatttaaagaaatgcagaaacaaggagtgagtccagatgcagtcacatattcaaccgtaatacatgctttttgcaaaaaaggg

SEQ ID NO: 2306 - DNA, 864 bp, Triticum aestivum
  source 1..864: mol_type = genomic DNA
atggactgctgcagccgtgcgtgctgcccggaactggcgcttgccttcttcgcccgtctactgaggtcggggctgagggtaggtgtcatagaagtccgcaccctcctcaagggcctctgccatgcaaagcgggcagaggaggccatggacgtgctgcttcacaggatgcccgagctgggctgcaccccgggcgtggtggcatataacactgtcatcaacggcttctttaaggaaggccaagtaggcaaggcgtgcagtctattccatggaatgccgcagcggggcgttttgcctgatgtagtgacatatacctctgttgtcgatgggctgtgcaaggccagagccatggacaaggcagagtatttccttcgtcagatggttgatagtggtgtcgtacctgataatgtgacatataatagcctcatccatggatattcctctttgggccatcagaaggaggctgttagggtgctgaaagagatgaatcggagggttacaccagatgtcattacctgcacctcactcatggccttcctttgcaagaatggaaaaagcaaggaagctgcagaaatttttgattcaatggccacgaagggcctgaaacatgacgccgtttcatatgctattctccttcatgggtatgccactgaaggatgcttggttgatatgattaatctcttcaattcgatggacagagactgtattctacctgacggtcgtatcttcaacatactgattaatgcatatgctaaatctgggaaccttgataaggctatgcttatatttaaagaaatgcagaaacaaggagtgagtccagatgcagtcacatattcaaccgtaatacatgctttttgcaaaaaaggg

SEQ ID NO: 2307 - DNA, 1527 bp, Triticum aestivum
  source 1..1527: mol_type = genomic DNA
atgggagaggcggagcttgagccccgaggcggcggcctcggtctgcgtggcgacggcggccgctgcggccgcctgggcggtgtggtggtcgggcctgggcgcggtgctgctgccgtgccgggtgctcgcggtggaggatggggttggctcttcttcggtctgctcggcggccggcggcgtcgtcccggtggccaggggagcaggtccggtgggtggctcctccggcagcgtctccaggcctggcgtggagcggatccggtggtcagggacctacctacacaccaaggccatgcctcgcttctcctccaccacgccaatggcgccaccccgcctccgcctccgactcggctcccgccactcctcctccacctctcatccctcacgcatctgggatccccacgccgccttcgccgccgccgcagaccgcgcgcgctctggcaacctcaccgcggaggacgcacaccacctgttcgacgaattgctgcggcagggcaatcctgtccaggaccgccccctcaacaaacttctctccgccctcgcccgtgctccggcgtccgcggcctgcggcgacggcccgccctcgcggtcgccctcttcagccgcatatcccaaggtgcccgccgacgggtggcagagccaacggcctgcacttacggtatcctcatggactgctgcagccgtgcgtgctgcccggaactggcgcttgccttcttcgcccgtctactgaggtcggggctgagggtaggtgtcatagaagtccgcaccctcctcaagggcctctgccatgcaaagcgggcagaggaggccatggacgtgctgcttcacaggatgcccgagctgggctgcaccccgggcgtggtggcatataacactgtcatcaacggcttctttaaggaaggccaagtaggcaaggcgtgcagtctattccatggaatgccgcagcggggcgttttgcctgatgtagtgacatatacctctgttgtcgatgggctgtgcaaggccagagccatggacaaggcagagtatttccttcgtcagatggttgatagtggtgtcgtacctgataatgtgacatataatagcctcatccatggatattcctctttgggccatcagaaggaggctgttagggtgctgaaagagatgaatcggagggttacaccagatgtcattacctgcacctcactcatggccttcctttgcaagaatggaaaaagcaaggaagctgcagaaatttttgattcaatggccacgaagggcctgaaacatgacgccgtttcatatgctattctccttcatgggtatgccactgaaggatgcttggttgatatgattaatctcttcaattcgatggacagagactgtattctacctgacggtcgtatcttcaacatactgattaatgcatatgctaaatctgggaaccttgataaggctatgcttatatttaaagaaatgcagaaacaaggagtgagtccagatgcagtcacatattcaaccgtaatacatgctttttgcaaaaaaggg

SEQ ID NO: 2308 - DNA, 1527 bp, Triticum aestivum
  source 1..1527: mol_type = genomic DNA
atgggcgaggcggagcttgagccccgaggcggcggcctcggtctgcgtggcgacggcggccgctgcggccrcctgggcggtgtggtggtcgggcctgggcgcggtgctgctgccgtgccgggtgctcgcggtggaggatggggttggctcttcttcggtctgctcggcggccggcggcgtcgtcccggtggccaggggagcaggtccggtgggtggctcctccggcagcgtctccaggcctggcgtggagcggatccggtggtcagggacctacctacacaccaaggccatgcctcgcttctcctccaccacgccaatggcgccaccccgcctccgcctccgactcggctcccgccactcctcctccacctctcatccctcacgcatctgggatccccacgccgccttcgccgccgccgcagaccgcgcgcgctctggcaacctcaccgcggaggacgcacaccacctgttcgacgaattgctgcggcagggcaatcctgtccaggaccgccccctcaacaaacttctctccgccctcgcccgtgctccggcgtccgcggcctgcggcgacggcccgccctcgcggtcgccctcttcagccgcatatcccaaggtgcccgccgacgggtggcagagccaacggcctgcacttacggtatcctcatggactgctgcagccgtgcgtgctgcccggaactggcgcttgccttcttcgcccgtctactgaggtcggggctgagggtaggtgtcatagaagtccgcaccctcctcaagggcctctgccatgcaaagcgggcagaggaggccatggacgtgctgcttcacaggatgcccgagctgggctgcaccccgggcgtggtggcatataacactgtcatcaacggcttctttaaggaaggccaagtaggcaaggcgtgcagtctattccatggaatgccgcagcggggcgttttgcctgatgtagtgacatatacctctgttgtcgatgggctgtgcaaggccagagccatggacaaggcagagtatttccttcgtcagatggttgatagtggtgtcgtacctgataatgtgacatataatagcctcatccatggatattcctctttgggccatcagaaggaggctgttagggtgctgaaagagatgaatcggagggttacaccagatgtcattacctgcacctcactcatggccttcctttgcaagaatggaaaaagcaaggaagctgcagaaatttttgattcaatggccacgaagggcctgaaacatgacgccgtttcatatgctattctccttcatgggtatgccactgaaggatgcttggttgatatgattaatctcttcaattcgatggacagagactgtattctacctgacggtcgtatcttcaacatactgattaatgcatatgctaaatctgggaaccttgataaggctatgcttatatttaaagaaatgcagaaacaaggagtgagtccagatgcagtcacatattcaaccgtaatacatgctttttgcaaaaaaggg

SEQ ID NO: 2309 - DNA, 1515 bp, Triticum aestivum
  source 1..1515: mol_type = genomic DNA
atgccacgcgtgcgacccggctcgtcctccagcaccgtctccgcacgcgccaaccagcagctgctaaacaaactcaaggatcatctggactctgggacgctccagccggagcgcgcacaccaactgttcgacaaattgctgcgccaaacggttccggtatcagcgtgcgcactcaatggcttatttgcttccctcgcgcgtgcgctgccctccgctgcctgcaccgacggctctgctctagccattgctctcttcaaccgcatggctcgagagggccgccgggtgatagcacccaacatttacacctacagcatactaattgactgctgctgccgctcgcgccgccctgacctaggtcccgccttcttcggcttcctcctcaagacaggcatcaaggcggacatcatcaccttcaccagcctattcaagtgcctctgtgacatgaagcggatagacgaggctgtgggagtgctgcttcacaggatgcccggagacatgcctgatgtcatctcctactcaacaatcctcaagggcttctgcaatgaggggaggagccagcttgcacttaatctgctccagatgatggtcaaaaaaggagctggccactcacccaacgtggtatcatacaacatggtaatcgatggcttctttaaggagggtgaagtaagcaaagcatgcaatctattccatgaaatgaaacagcggggggtcgtgcctgatgtgtggacatataattccattatcgatgcaatgtgcaaagcaagagcaatggacaaggcaaaattggtcctaagacaaatggttgatagtggggttcaaccggatattgtgacatataataaactgatccatggatattccatttcgggccagtttgaagaggtcgttaggttgttggacaaaatgagaagtcaaggcgtcaaaccaactgtttttacttgcaacacagtcatggactacctttgcaagcatggaagaatcaaagaagctgcagaatttttttattccatggttgagaagggccttaaacctaatatagtctcatatgctattatgtttcgtgggtacgctaaagaaggatcccttgttgaaatgactgatctctgtgagctgatggcaagagatggtattgtacccgatctccattgtttcaacatactgattaatgcatatgctaagtgtgggatgatggatgtggctatttttttcttcaaagacatgttgaagcagggagtgaaccctgatgaagtcacatatttagctgtgatagccgggtattgcagagtgggcatgatggatgatgctatggaaaatttcaatgagatgatcggtatgggagtaccacataacgcaactgtttacaggtgcatgattcagggttacttaaatcatggtgattttttgaaagcaaaggaattgattactgaaatgaagaccaagggtatccatcctagaccgcggaaaagccaagggtacctcatgacgcaactgtttacatcaatggaatgttggtca

SEQ ID NO: 2310 - DNA, 1515 bp, Triticum aestivum; identical to SEQ ID NO: 2309
  source 1..1515: mol_type = genomic DNA

SEQ ID NO: 2311 - DNA, 1512 bp, Triticum aestivum
  source 1..1512: mol_type = genomic DNA
atgccacgcgtgcgacccggctcgtcctccagcaccgtctccgcacgcgccaaccagctgctaaacaaactcaaggatcatctggactctgggacgctccagccggagcgcgcacaccaactgttcgacaaattgctgcgccaaaccgttccggtaccagcgtccgcactcaatggcttatttgccgccctcgcgcgtgcgctgccctccgctgcctgcaccgacggccctgctctagccattgctctctttaaccgcatggctcgagagggccgccgggtgatagcacccaacatttacacctacagcatactaattgactgctgctgccgctcgcgccgccctgacctaggtcccgccttcttcggcttcctcctcaagacaggcatcaaggcggacatcatcaccttcaccagcctattcaagtgcctctgtgacatgaagcggatagacgaggctgtgggagtgctgcttcacaggttgcccggagacatgcctgatgtcatctcctactcaacaatcctcaagggcttctgcaatgaggggaggagccagcttgcacttaatctgctccagatgatggtcaaaaaaggagctggccactcacccaacgtggtatcatacaacatggtaatcgatggcttctttaaggagggtgaagtaagcaaagcatgcaatctattccatgaaatgaaacagcggggggtcgtgcctgatgtgtggacatataattccattattgatgcaatgtgcaaagcaagagcaatggacaaggcaaaattggtcctaagacaaatggttgatagtggggttcaaccggatattgtgacatataataaactgatccatggatattccatttcgggccagtttgaagaggtcgttaggttgttggacaaaatgagaagtcaaggcgtcaaaccaactgtttttacttgcaacacagtcatggactacctttgcaagcatggaagaatcaaagaagctgcagaatttttttattccatggttgagaagggccataaacctaatatagtctcatatgctattatgtttcgtgggtacgctaaagaaggatcccttgttgaaatgactgatctctgtgagctgatggcaagagatggtattgtacccgatctccattgtttcaacatactgattaatgcatatgctaagtgtgggatgatggatgtggctattcttttcttcaaagacatgttgaagcagggagtgaaccctgatgaagtcacatatttagctgtgatagccgggtattgcagagtgggcatgatggatgatgctatggaaaatttcaatgagatgatcggtatgggagtaccacataacgcaactgtttacaggtgcatgattcagggttacttaaatcatggtgatttcttgaaagcaaaggaattgattactgaaatgaagaccaagggtatccatcctagaccgcggaaaagccaaggaattgatccagggtacctcatgacgcaactgtttacaggtgca

SEQ ID NO: 2312 - DNA, 1515 bp, Triticum aestivum; identical to SEQ ID NO: 2309
  source 1..1515: mol_type = genomic DNA

SEQ ID NO: 2313 - DNA, 1515 bp, Triticum aestivum; identical to SEQ ID NO: 2309
  source 1..1515: mol_type = genomic DNA

SEQ ID NO: 2314 - DNA, 1512 bp, Triticum aestivum; identical to SEQ ID NO: 2311
  source 1..1512: mol_type = genomic DNA

SEQ ID NO: 2315 - DNA, 1425 bp, Triticum aestivum
  source 1..1425: mol_type = genomic DNA
atgatgcagcaagggattgtgcctaatgtggtgacatatagctcgattattgatgccttgtgcaaggtcagggcaatggacaaggcaaagctggtccttcagcagatggttgataatggtgttcaaccagatgttgttacttggaactcattcatgtactccttttgcaagcatggaaaaagcaaagaagctgcagaattttttgactccatgaccaccaagggcctcaaacctgatattgtcgcgtactctactcttcttcacgggtatgctactgaaggatgcctagccgatatgattaatctctttaatacaatggaagacaatggtattgtagccaactgcaatgttttcaacatattaattgatgcatatgctaaacgtggaatgatgcatgaagctatgctcatatttaccgaaatgcaggaacaaagagttagtctggatgtgtgcacctatgcaactgtaatagctgcactttgcagaatgggcaggctggctgatgccatggacaaactaaatgagatgattgctatgggattacaaccgaacaaggttgtttatcactctctaattcagggcttttgtacacatagtgatttggtgaaagcaaaggccttggtttctgaaatgatgaacaaaggtattcctcgtccaaacattgtgttcttcagctcagtaataaacagcctatgcaaggaaggaagggttacagatgcacacgatatcttcgacttggctataaacattggtgagaggcctgacgttattacatttaattcactgattgacggatattgtttagccgggaagatggataaagcattcggagtacttgatgccatggtatcagctggcattgagcacaatgttgtcacatacaatacacttgttgatggctattctagaaatggaaggattgatgatgggttgaccctattcagagaaatgacgcgtaacaaaattaaacctacaactgctacatatggcgccatacttcatgggttgtttcgtgctggcagaacttcttctgcgaagaaaatgttcaatgagatgattgaaagtggaacaacagtggacattcccatatatgctataattcttggaggactttgtagaaacaattgcgttgatgaagcaatcatcttgttcgagaaattaggtgcaatgaatgtgaagttggatgttggaatattcaataccatgattaatgcagtgtacacggttaagggaagagaagaagctaaggatttgtttgctgcaatatcagccaattggttggtacctaatgcttcttcttacggtgttatgataacaaatcttctaagagaaggattagtggaagaagctgacaatatgttttcatcaatggacaagagtggttgtgctcctagctctcgtctgttaaatattatcatcagaatg

SEQ ID NO: 2316 - DNA, 1425 bp, Triticum aestivum; identical to SEQ ID NO: 2315
  source 1..1425: mol_type = genomic DNA

SEQ ID NO: 2317 - DNA, 1425 bp, Triticum aestivum; identical to SEQ ID NO: 2315
  source 1..1425: mol_type = genomic DNA

SEQ ID NO: 2318 - DNA, 1425 bp, Triticum aestivum; identical to SEQ ID NO: 2315
  source 1..1425: mol_type = genomic DNA

SEQ ID NO: 2319 - DNA, 1425 bp, Triticum aestivum; identical to SEQ ID NO: 2315
  source 1..1425: mol_type = genomic DNA

SEQ ID NO: 2320 - DNA, 1425 bp, Triticum aestivum; identical to SEQ ID NO: 2315
  source 1..1425: mol_type = genomic DNA

SEQ ID NO: 2321 - DNA, 1503 bp, Triticum aestivum
  source 1..1503: mol_type = genomic DNA
atgctccgccgcatccgcctccgtcgccgcccctacccctcctgcacctacccggagcccgtcctctgccactcctccagctttatctctgcggctcccctcctccgcctccaccagtaccgcaccaccaccacgccgatgtcccgcatccacctccgccgtcgcctcttctcctccaccacgcggccctcgcactcctggtctccacatgccgcctttgccgcagcaacagagcgcgtacgcaccggggcgctcagccaagacgatgcacaccacctgttcgacgaattgctgcggcaggccaccccggtccccgggcgctccctcaacggcttccttgccgccctcgcccgtgcgcccgcctccggagcctgcagagatgggcccgccctcgccctcgctctcttcaaccgcgtctgcctggatgaatccggcgcgcgggtggcaccgcccacaatcttcacctacggcatcctcatgaactgctgctgccgcgcgcatcgcccggacctagggctcgccttcttggctcgcctcctcaggacgggcctgaaggctgaccagatcgtcgccaacaccttcctcaagtgcctctgctgcgcgaaacggacggatgaggctgtgaacgtgctgcttcataggatgccccggctcggctgtgtgcctaatgccttctcatacagcattgttctcaagagcttatgcgataatggcatgagccggcaggcgctcgacctgctccatatgatggcgaaagaaggaggtggctgctcccccaacgtggtggcgtatagcacagtcatccatggcttctttaaggaaggtgaaacaggcaaggcatgcaatctgttccatgaaatgatgcagcaaggtgttgagcccaatgtgtggacatatagttcaatcattgatgcgttgtgcaaggccagagcaatggacaaggcagagctagtgcttgagaagatggttaacaaaggtgttcaacccaataatgtgacatataattgcatgatccatggatattccacatcagggcagttgaaagaggctgctaaaatgttcagagaaatgacaagtcagggtcttataccagataactttacttgcagctccttaatgacttacctttgtaagcatggaagaagcaaagaagctgcagaattttttgatgccatgactgccaaaggccacagagatgtcatctcctactgcattttgcttcatgggtatgccaatgaaggatgctttgctgatatgattgatctctttaattcaatgcaaagaaacggtattgctgccaactgccatgttttcaacatattaattaatggatatgctaaacgtggaatgacggatgaagctatgctgatatttacagaaatgtgggaaaaaggagtgagtcccgatgtagtcacctattccactgtaatagctgcactttccaggatgggggggttgaccgacgctatggaaaaatttaatcagatgattgccatgggaatt

SEQ ID NO: 2322 - DNA, 1470 bp, Triticum aestivum
  source 1..1470: mol_type = genomic DNA
atgtggtggcgtatagcacggtcatccatggcttttttaaggagggtgaaacagggaaggcatgcagtctattccatgacagccaagggccaaaaacctgatatcatctcgtattgtactttgcttcatgggyatgccartgaaggatgctttrctgatatgattgatctctttaattcaatgaaaagcaacggtattgcagctgactgccgtgtttttaccatattaattgatgcctatgctaaacgtggaatgatggatgatgcaatgcacatatttacggaaatgtgggaaaaaggagtgagtcccgatgtggttacctattccactgtaatagctgcactttccaggatgggtagattgaccgatgctatggacaaatttaatcagatgatttccatgggggttcaaccgaacacagttgtttatcacaccctaattcagggctcttgtatgcatggtgatttgattaaagccaaggagctggtttctgaaatgatgaacaaaggtattcctcgtcctagcattgcgttcttcggttcaataataaacaggttatgcaaagatggaagggttatggatgcacatgatatctttgacttggttatagacataggcgagaggcctagtgtcattacatttaattcactggttgacggatattgcttagtcggcaagatggataaagcatttggaatgcttaatgccatggaatcagttggtgttgagcctgatattgttacttacagtacacttcttgatggctattttaaaaatggaaggatcaatgatggtttgactctgtttagagaaatgccgcttaagagaattaaacctgacactgttacatatggcatcatgttggatgggtgttttcgtgctgggagaactgttgctgcaaggacaatgttccatgagatgatcgaaagtggaataacagtggacatccccacatataatatagttcttaggggactttgtagaaataactgcacagatgaagcaatcgccctgttccagaaattaggtgcaatgagtatgaagttcaatattgcaatactcaataccatgatcaatgcaatctacaaggttcggagaagagaagaagctaacaatttgtttgctgcaatatcagccagtgggttggtgcccaatcaatctacttatgctgtaatgataataaatcttctaaaagatggagcagtggaacatgctagcaatatgttttcatcaatggagaaaagtggtattgtccccagctcccgtcttataaatggtatcatcagattgttgttggagaatggtgagattgccaaggctggaatttatttgtctaaagttgatgggaatagcatctcacttgaagcttcaactacttcattgatgttgtctctgttttcaaggaaagggaaatatcaggaggacatgaagttgctccctgcaaagtatcaattttttggtgaatttggc

SEQ ID NO: 2323 - DNA, 1509 bp, Triticum aestivum
  source 1..1509: mol_type = genomic DNA
atgccacgcgtccgacccggctcgtcctccagcaccgtctcctcacgcgccaaccagctgctaaacaaactcaaggatcatctgggctctgggacgctccagccggagcgcgcacaccaactgttcgacaaattgctgcgccaaaccgttccggtatcagcgttcgcactcaatggcttatttgccgccctcgcgcgtgcgctgccctccgctgcctgcaccgacggccctgctctagccattgctctcttcaaccgcatggctcgagagggccgccgggtgatagagcccaacatttacacctacaacatactaattgactgctgctgccgctcgcgccaccctgacctaggtcccgccttcttcggcttcctcctcaagacaggcatcaaggcggacatcatcaccttcaacagcctattgaagtgcctctgtgacatgatgcagatggaggaggccctcaacatgctgctctacaggatgcctgagctgcctgatagcatctcctactcaataattattaagagcttatgtgacaatgggaggagccaatgtgcacttgacctgctccggatgaaggccaaaaagggagctgaccactaccctggattggtggcatacaacagggtaatcaatggcttaattaaggagggtgaactaagcaaagcatgctctctattccatgaaatgatgcagcagggggtcgtgcctaatgtggtgacgtatagctccattatcgatgcattgtgcaaagcaggagcaatggacaaggcagaggtggcccttcgacaaatggttggtaatggtgttcgaccggatatttttacatatactagcctgatccatggatattccatttcaggccagtttgaagaggtcgttaggttgttggaaaaattgagaagtcaaggtgtcaaaccaactgtttttacctgcaacacagtcatggactacctttgcaagcatggaaaaatcaaagaagctgcagaatttttttattccatgcctgagaagggccataaacctaatatagtgtcatactctattatgctttatgggtacgctaaagaaggatcccttgttgaaatgactgatctctgtgagctgatggcaagagacggtattgtacccgatctccattgtttaaacatactgattaatgcatatgctaagtgtggaatgatggatgtagctatgcttttcttcaaagacatgttgaagcagggagtgaaccctgatgaagtcacatatttagctgtgataaccgggtattgcagagtgggcatgatggatgatgctatggaaaaattcaatgagatgatcgatatgggagtaccacgtaactcaactgtttacaggtgcatgattcagggttacttaaatcatggtgatttcttgaaagcaaaggtattgactactgaaatgaagaccaagggtatccatcctagaccacggaaaagccaaagaattgattcagggtacctcatgacacaactatttacaggtgca

SEQ ID NO: 2324 - DNA, 1509 bp, Triticum aestivum
  source 1..1509: mol_type = genomic DNA
atgccacgcgtccgacccggctcgtcctccagcaccgtctcctcacgcgccaaccagctgctaaacaaactcaaggatcatctgggctctgggacgctccagccggagcgcgcacaccaactgttcgacaaattgctgcgccaaaccgttccggtatcagcgttcgcactcaatggcttatttgccgccctcgcgcgtgcgctgccctccgctgcctgcaccgacggccctgctctagccattgctctcttcaaccgcatggctcgagagggccgccgggtgatagagcccaacatttacacctacaacatactaattgactgctgctgccgctcgcgccaccctgacctaggtcccgccttcttcggcttcctcctcaagacaggcatcaaggcggacatcatcaccttcaacagcctattgaagtgcctctgtgacatgatgcagatggaggaggccctcaacatgctgctctacaggatgcctgagctgcctgatagcatctcctactcaataattattaagagcttatgtgacaatgggaggagccaatgtgcacttgacctgctccggatgaaggccaaaaagggagctgaccactaccctggattggtggcatacaacagggtaatcaatggcttaattaaggagggtgaactaagcaaagcatgctctctattccatgaaatgatgcagcagggggtcgtgcctaatgtggtgacgtatagctccattatcgatgcattgtgcaaagcaggagcaatggacaaggcagaggtggcccttcgacaaatggttggtaatggtgttcgaccggatatttttacatatactagcctgatccatggatattccatttcaggccagtttgaagaggtcgttaggttgttggaaaaattgagaagtcaaggtgtcaaaccaactgtttttacttgcaacacagtcatggactacctttgcaagcatggaaaaatcaaagaagctgcagaatttttttattccatgcctgagaagggccataaacctaatatagtgtcatactctattatgctttatgggtacgctaaagaaggatcccttgttgaaatgactgatctctgtgagctgatggcaagagacggtattgtacccgatctccattgtttaaacatactgattaatgcatatgctaagtgtggaatgatggatgtagctatgcttttcttcaaagacatgttgaagcagggagtgaaccctgatgaagtcacatatttagctgtgataaccgggtattgcagagtgggcatgatggatgatgctatggaaaaattcaatgagatgatcgatatgggagtaccacataactcaactgtttacaggtgcatgattcagggttacttaaatcatggtgatttcttgaaagcaaaggtattgactactgaaatgaagaccaagggtatccatcctagaccacggaaaagccaaagaattgattcagggtacctcatgacacaactatttacaggtgca

SEQ ID NO: 2325 - DNA, 1509 bp, Triticum aestivum; identical to SEQ ID NO: 2324
  source 1..1509: mol_type = genomic DNA

SEQ ID NO: 2326 - DNA, 1509 bp, Triticum aestivum; identical to SEQ ID NO: 2324
  source 1..1509: mol_type = genomic DNA

SEQ ID NO: 2327 - DNA, 1509 bp, Triticum aestivum; identical to SEQ ID NO: 2324
  source 1..1509: mol_type = genomic DNA

SEQ ID NO: 2328 - DNA, 1509 bp, Triticum aestivum; identical to SEQ ID NO: 2323
  source 1..1509: mol_type = genomic DNA

SEQ ID NO: 2329 - DNA, 909 bp, Triticum aestivum
  source 1..909: mol_type = genomic DNA
atggactgctgctgccgcgcgcgtcgcccggacctagggctcgccttattcggccgcttcctcgggacaggcctgaggacaaacgagatcgtcgccaccaccttcctcaagtgcctctgctgcgcgaaacggacagaagaggttgtgaaagtactgcttcacagaatgcccgagctgggctgtgtgcctaatgccatctcgtactccatagttttgaaaagcttgtgtgaaaatagcatgagtcagcaggcactcgacctgctccagatggtagggaaagaaggaggctgccttcgtgatgtggtggcatataacacaatcatccatggcttctttaaggagggcggaatagacaaggcatgccatctattccatgaaatgatgcggcaaggggttgtgccgactgtggtgacatacaacacagtaattgatgcgttgtgcaaggccggagaaatggacaaggcagagctagtctttcagcagatggctcgtaatggtgcgcagcccaataaagtgacatgtaatggcagtaaatttagttcactgactgacggatattgctcagtcggcaagatggataaaacattcaaactgcttgatgccatggtatcagttggaattgagcctgatgctgttacttatagtgcacttcttgatggctattttaaaaatggaaggatcgatgatggtttgactctatttagagaaatgtcgtgcaagggagttaaaccaacaactgtgacatatggcatcatactggatggtttatatcgtgctgggagaactgctgctgccaagaaaatgtttgatcagatgatcaaaagtggaataacagtgaccgtttccatatacactactccctcctttccggtttataaggcgtatttcaacttttttgtttttccaatt

SEQ ID NO: 2330 - DNA, 909 bp, Triticum aestivum; identical to SEQ ID NO: 2329
  source 1..909: mol_type = genomic DNA

SEQ ID NO: 2331 - DNA, 909 bp, Triticum aestivum
  source 1..909: mol_type = genomic DNA
atggactgctgctgccgcgcgcgtcgcccggacctagggctcgccttattcggccgcttcctcgggacaggcctgaggacaaacgagatcgtcgccaccaccttcctcaagtgcctctgctgcgcgaaacggacagaagaggttgtgaaagtactgcttcacagaatgcccgagctgggctgtgtgcctaatgccatctcgtactccatagttttgaaaagcttgtgtgaaaatagcatgagtcagcaggcactcgacctgctccagatggtagggaaagaaggaggctgccttcgtgatgtggtggcatataacacaatcatccatggcttctttaaggagggcggaatagacaaggcatgccatctattccatgaaatgatgcggcaaggggttgtgccgactgtggtgacatacaacacagtaattgatgcgttgtgcaaggccggagaaatggacaaggcagagctagtctttcagcggatggctcgtaatggtgcgcagcccaataaagtgacatgtaatggcagtaaatttagttcactgactgacggatattgctcagtcggcaagatggataaaacattcaaactgcttgatgccatggtatcagttggaattgagcctgatgctgttacttatagtgcacttcttgatggctattttaaaaatggaaggatcgatgatggtttgactctatttagagaaatgtcgtgcaagggagttaaaccaacaactgtgacatatggcatcatactggatggtttatatcgtgctgggagaactgctgctgccaagaaaatgtttgatcagatgatcaaaagtggaataacagtgaccgtttccatatacactactccctcctttccggtttataaggcgtatttcaacttttttgtttttccaatt

SEQ ID NO: 2332 - DNA, 909 bp, Triticum aestivum; identical to SEQ ID NO: 2329
  source 1..909: mol_type = genomic DNA

SEQ ID NO: 2333 - DNA, 1512 bp, Triticum aestivum
  source 1..1512: mol_type = genomic DNA
atgccaaatgcaaatggtgtgaagatgtttgttatttcacggtacacagttgtgctcacttttcttgtcaatttcagccacctactcaaggccatctgtgcggagaagaagaccagctatgcaatggacatcgtactccgagtaatgcccgagtttaactatgttccgaacattttctcctataacattcttttcaagggtctctgcaacgagaagagaagccaagaggctctcgagctgattcaaattatggttgaggatggaggtggctgccgacctgatgtggtgacctatagcactgtaattgatggcttgttgaaagagggtgaggtggaccaagcttacagcctattttctgaaatgctgcgtcagggggtatcaccgaatattgtgacctgtaattcaatcatctctggcatgtgcaagcttcacgcgatggacaaggctgaggaggttcttcaacagatgcttgatagacgaattctgccagatgttaccacatatactagtctaatacatggatattattcattaggacagtgcgaggaggtggatcgggttttcaaagaaatgtctagaaatggtgttcaaccaaatattataacttatagtatacagatggattatctttgcaagaatggaagatgcacagaagctaggaagatttttgattctatggtcagtttgggccaaaaaccagatgttactacctacagcattctgcttcatgggtatgctatggaacgatcttttcatgatattcattgtctcattgatttgatggtcgaaaatggtctgtcaccaaataactatatctacaacatactcatatctgcatgtgctaaagaaaaaatggttgatgaggcgatgcatatatttacaaaaatgcggcagcaaggattgaaccctgatgcagtgagctacggaacagtaatagacttgctttccagttttggccgaatggatgatgctatgtccctattcaataaaatgataactgaaggattagctcctggtatcatagttttcaaccaccttattagtggtttttgtacttgtggcaaatgggtgaaggttcatgaactattttctgagatgttggatcgcggcatctgtcccaacacagtgttcttcaacacaattatggatcgcctttgcaaaaatggaagggttatggatgcccaagatctcttcgacctaatgatacacatgggtgtgaagcctgatgtgtgtacttatagcacactgataggtggatacttgttcgttggtaagatggatgaagtgaggaagttactagaaaatatgtgctcaattggcttgaaaccagatgttgtcacctatagcatactgatagatggttactctaagaatggaaggatagatgatgcactggttgttatcagggaaatggacggtgttaagccttctattatcacttttaatattatgattggtgtgttgcttaaaggtagcagaatggaagaagccaaagatttgtttgacggtatc

SEQ ID NO: 2334 - DNA, 1512 bp, Triticum aestivum
  misc_feature 611: note = n is a, c, g, or t
  misc_feature 1070: note = n is a, c, g, or t
  source 1..1512: mol_type = genomic DNA
atgccaaatgcaaatggtgtgaagatgtttgttatttcacggtacacagttgtgctcacttttcttgtcaatttcagccacctactcaaggccatctgtgcggagaagaagaccagctatgcaatggacatcgtactccgagtaatgcccgagtttaactgtgttccgaacattttctcctataacattcttttcaagggtctctgcaacgagaagagaagccaagaggctctcgagctgattcaaattatggttgaggatggaggtggctgccgacctgatgtggtgacctatagcactgtaattgatggcttgttgaaagagggtgaggtggaccaagcttacagcctattttctgaaatgctgcgtcagggggtatcaccgaatattgtgacctgtaattcaatcatctctggcatgtgcaagcttcacgcgatggacaaggctgaggaggttcttcaacagatgcttgatagacgaattctgccagatgttaccacatatactagtctaatacatggatattattcattaggacagtgcgaggaggtggatcgggttttcaaagaaatgtctagaaatggtgttcaaccaaatattataacttatantatacagatggattatctttgcaagaatggaagatgcacagaagctaggaagatttttgattctatggtcagtttgggccaaaaaccagatgttactacctacagcattctgcttcatgggtatgctatggaacgatcttttcatgatattcattgtctcattgatttgatggtcgaaaatggtctgtcaccaaataactatatctacaacatactcatatctgcatgtgctaaagaaaaaatggttgatgaggcgatgcatatatttacaaaaatgcggcagcaaggattgaaccctgatgcagtgagctacggaacagtaatagacttgctttccagttttggccgaatggatgatgctatgtccctattcaataaaatgataactgaaggattagctcctggtatcatagttttcaaccaccttattagtggtttttgtacttgtggcaaatgggngaaggttcatgaactattttctgagatgttggatcgcggcatctgtcccaacacagtgttcttcaacacaattatggatcgcctttgcaaaaatggaagggttatggatgcccaagatctcttcgacctaatgatacacatgggtgtgaagcctgatgtgtgtacttatagcacactgataggtggatacttgttcgttggtaagatggatgaagtgaggaagttactagaaaatatgtgctcaattggcttgaaaccagatgttgtcacctatagcatactgatagatggttactctaagaatggaaggatagatgatgcactggttgttatcagggaaatggacggtgttaagccttctattatcacttttaatattatgattggtgtgttgcttaaaggtagcagaatggaagaagccaaagatttgtttgacggtatc

SEQ ID NO: 2335 - DNA, 1512 bp, Triticum aestivum
  source 1..1512: mol_type = genomic DNA
atgccaaatgcaaatggtgtgaagatgtttgttatttcacggtacacagttgtgctcacttttcttgtcaatttcagccacctactcaaggccatctgtgcggagaagaagaccagctatgcaatggacatcgtactccgagtaatgcccgagtttaactgtgttccgaacattttctcctataacattcttttcaagggtctctgcaacgagaagagaagccaagaggctctcgagctgattcaaattatggttgaggatggaggtggctgccgacctgatgtggtgacctatagcactgtaattgatggcttgttgaaagagggtgaggtggaccaagcttacagcctattttctgaaatgctgcgtcagggggtatcaccgaatattgtgacctgtaattcaatcatctctggcatgtgcaagcttcacgcgatggacaaggctgaggaggttcttcaacagatgcttgatagacgaattctgccagatgttaccacatatactagtctaatacatggatattattcattaggacagtgcgaggaggtggatcgggttttcaaagaaatgtctagaaatggtgttcaaccaaatattataacttatattatacagatggattatctttgcaagaatggaagatgcacagaagctaggaagatttttgattctatggtcagtttgggccaaaaaccagatgttactacctacagcattctgcttcatgggtatgctatggaacgatcttttcatgatattcattgtctcattgatttgatggtcgaaaatggtctgtcaccaaataactatatctacaacatactcatatctgcatgtgctaaagaaaaaatggttgatgaggcgatgcatatatttacaaaaatgcggcagcaaggattgaaccctgatgcagtgagctacggaacagtaatagacttgctttccagttttggccgaatggatgatgctatgtccctattcaataaaatgataactgaaggattagctcctggtatcatagttttcaaccaccttattagtggtttttgtacttgtggcaaatgggagaaggttcatgaactattttctgagatgttggatcgcggcatctgtcccaacacagtgttcttcaacacaattatggatcgcctttgcaaaaatggaagggttatggatgcccaagatctcttcgacctaatgatacacatgggtgtgaagcctgatgtgtgtacttatagcacactgataggtggatacttgttcgttggtaagatggatgaagtgaggaagttactagaaaatatgtgctcaattggcttgaaaccagatgttgtcacctatagcatactgatagatggttactctaagaatggaaggatagatgatgcactggttgttatcagggaaatggacggtgttaagccttctattatcacttttaatattatgattggtgtgttgcttaaaggtagcagaatggaagaagccaaagatttgtttgacggtatc

SEQ ID NO: 2336 - DNA, 1077 bp, Triticum aestivum
  source 1..1077: mol_type = genomic DNA
atggacaaggctgaggaggatcttcaacagatgcatgatagacgaattctgccagatgttaccacatatactagtctaatacatggatattattcattaggacagtgcgaggaggtggatcgggttttcaaagaaatgtctagaaatggtgttcaaccaaatattataacttatagtatacagatggattatctttgcaagaatggaagatgcacagaagctaggaagatttttgattctatggtcagtttgggccaaaaaccagatgttactacctacagcattctgcttcatgggtatgctatggaacgatcttttcatgatattcattgtctcattgatttgatggtcgaaaatggtctgtcaccaaataactatatctacaacatactcatatctgcatgtgctaaagaaaaaatggttgatgaggcgatgcatatatttacaaaaatgcggcagcaaggattgaaccctgatgcagtgagctacggaacagtaatagacttgctttccagttttggccgaatggatgatgctatgtccctattcaataaaatgataactgaaggattagctcctggtatcatagttttcaaccaccttattagtggtttttgtacttgtggcaaatgggtgaaggttcatgaactattttctgagatgttggatcgcggcatctgtcccaacacagtgttcttcaacacaattatggatcgcctttgcaaaaatggaagggttatggatgcccaagatctcttcgacctaatgatacacatgggtgtgaagcctgatgtgtgtacttatagcacactgataggtggatacttgttcgttggtaagatggatgaagtgaggaagttactagaaaatatgtgctcaattggcttgaaaccagatgttgtcacctatagcatactgatagatggttactctaagaatggaaggatagatgatgcactggttgttatcagggaaatggacggtgttaagccttctattatcacttttaatattatgattggtgtgttgcttaaaggtagcagaatggaagaagccaaagatttgtttgacggtatc

SEQ ID NO: 2337 - DNA, 1512 bp, Triticum aestivum
  source 1..1512: mol_type = genomic DNA
atgccaaatgcaaatggtgtgaagatgtttgttatttcacggtacacagttgtgctcacttttcttgtcaatttcagccacctactcaaggccatctgtgcggagaagaagaccagctatgcaatggacatcgtactccgagtaatgcccgagtttaactgtgttccgaacattttctcctataacattcttttcaagggtctctgcaacgagaagagaagccaagaggctctcgagctgattcaaattatggttgaggatggaggtggctgccgacctgatgtggtgacctatagcactgtaattgatggcttgttgaaagagggtgaggtggaccaagcttacagcctattttctgaaatgctgcgtcagggggtatcaccgaatattgtgacctgtaattcaatcatctctggcatgtgcaagcttcacgcgatggacaaggctgaggaggttcttcaacagatgcttgatagacgaattctgccagatgttaccacatatactagtctaatacatggatattattcattaggacagtgcgaggaggtggatcgggttttcaaagaaatgtctagaaatggtgttcaaccaaatattataacttataktatacagatggattatctttgcaagaatggaagatgcacagaagctaggaagatttttgattctatggtcagtttgggccaaaaaccagatgttactacctacagcattctgcttcatgggtatgctatggaacgatcttttcatgatattcattgtctcattgatttgatggtcgaaaatggtctgtcaccaaataactatatctacaacatactcatatctgcatgtgctaaagaaaaaatggttgatgaggcgatgcatatatttacaaaaatgcggcagcaaggattgaaccctgatgcagtgagctacggaacagtaatagacttgctttccagttttggccgaatggatgatgctatgtccctattcaataaaatgataactgaaggattagctcctggtatcatagttttcaaccaccttattagtggtttttgtacttgtggcaaatgggagaaggttcatgaactattttctgagatgttggatcgcggcatctgtcccaacacagtgttcttcaacacaattatggatcgcctttgcaaaaatggaagggttatggatgcccaagatctcttcgacctaatgatacacatgggtgtgaagcctgatgtgtgtacttatagcacactgataggtggatacttgttcgttggtaagatggatgaagtgaggaagttactagaaaatatgtgctcaattggcttgaaaccagatgttgtcacctatagcatactgatagatggttactctaagaatggaaggatagatgatgcactggttgttatcagggaaatggacggtgttaagccttctattatcacttttaatattatgattggtgtgttgcttaaaggtagcagaatggaagaagccaaagatttgtttgacggtatc

SEQ ID NO: 2338 - DNA, 1512 bp, Triticum aestivum
  source 1..1512: mol_type = genomic DNA
atgccaaatgcaaatggtgtgaagatgtttgttatttcacggtacacagttgtgctcacttttcttgtcaatttcagccacctactcaaggccatctgtgcggagaagaagaccagctatgcaatggacatcgtactccgagtaatgcccgagtttaactgtgttccgaacattttctcctataacattcttttcaagggtctctgcaacgagaagagaagccaagaggctctcgagctgattcaaattatggttgaggatggaggtggctgccgacctgatgtggtgacctatagcactgtaattgatggcttgttgaaagagggtgaggtggaccaagcttacagcctattttctgaaatgctgcgtcagggggtatcaccgaatattgtgacctgtaattcaatcatctctggcatgtgcaagcttcacgcgatggacaaggctgaggaggttcttcaacagatgcttgatagacgaattctgccagatgttaccacatatactagtctaatacatggatattattcattaggacagtgcgaggaggtggatcgggttttcaaagaaatgtctagaaatggtgttcaaccaaatattataacttatagtatacagatggattatctttgcaagaatggaagatgcacagaagctaggaagatttttgattctatggtcagtttgggccaaaaaccagatgttactacctacagcattctgcttcatgggtatgctatggaacgatcttttcatgatattcattgtctcattgatttgatggtcgaaaatggtctgtcaccaaataactatatctacaacatactcatatctgcatgtgctaaagaaaaaatggttgatgaggcgatgcatatatttacaaaaatgcggcagcaaggattgaaccctgatgcagtgagctacggaacagtaatagacttgctttccagttttggccgaatggatgatgctatgtccctattcaataaaatgataactgaaggattagctcctggtatcatagttttcaaccaccttattagtggtttttgtacttgtggcaaatgggtgaaggttcatgaactattttctgagatgttggatcgcggcatctgtcccaacacagtgttcttcaacacaattatggatcgcctttgcaaaaatggaagggttatggatgcccaagatctcttcgacctaatgatacacatgggtgtgaagcctgatgtgtgtacttatagcacactgataggtggatacttgttcgttggtaagatggatgaagtgaggaagttactagaaaatatgtgctcaattggcttgaaaccagatgttgtcacctatagcatactgatagatggttactctaagaatggaaggatagatgatgcactggttgttatcagggaaatggacggtgttaagccttctattatcacttttaatattatgattggtgtgttgcttaaaggtagcagaatggaagaagccaaagatttgtttgacggtatc

SEQ ID NO: 2339 - DNA, 1209 bp, Triticum aestivum
  source 1..1209: mol_type = genomic DNA
atgtcacactctttctccagctccgtttcctcatgcgccaacgagctgctgaacgaactccacgaccatctgggcttcaggacgctcaggccagagctcgcgcaccaactgttcgatgaaatgctacgccaaccagtcccagtatcagtacgtgcactcaacgacttatttgttgcccttgcgcgtgcgccgccctccaccatctgcaccgacggacctgccctcgccattgatctcttcaaccgcatggcccaagcaggccgtcgccaggtgatagcacccaccattatcacctacaacatactaattgactgctgccaccgagcatgccgcccggacctagggcatgccttcttcggtcgcctcctcaagacaggcatcacaatgagcgtcattacctacaacagcctattcatgtgcctctgtgacatgaggcgaacaaaggaggctctgaacatgctgctccataggatgcccgatgacttgcctaatgtcatctcctactcagtgattctcaagagtttcagcgacagtgggaggagccagcttgcgcttgacctgctccaaatgatggccaaaaaaggtgctgaccactcccccgacgtgatgtcatacaacatagtaattgatggcttttttaaagagggtgaagtaagcaaagcatgcgatctattccaagaaatgatacgacaggggattgtgcctactaaggtgacatatatctccattatcaatgcgctgtgcaaagcaagagcaatggacaaggtagaggtggttcttcgatcaatggttcataatggtgtccaaccagaagctgtgacatatagtagcatgatccaaggatattcaactttgggccagttgaaagaagttgctaggttgttgcaagtaatgagaagccaatgttgtatgccaaatgttgttacttgcagctcagtcatggattacctttgcaagcatggaagaatcaaagaagccgaggaaatattttattccatggccgtgaatggacgaaaacctaatgtcatctcatactctattatgctccatgggtacgctatagaaggaacccttattaaaatgattgatctctgtgagctgatggcaagagatggagttgtacccgacctccgttgtttcaacatactgattaatgcatatgctaagtatggcatgatggatgtggccatgcttttctttgaagacatg

SEQ ID NO: 2340 - DNA, 1209 bp, Triticum aestivum; identical to SEQ ID NO: 2339
  source 1..1209: mol_type = genomic DNA

SEQ ID NO: 2341 - DNA, 1209 bp, Triticum aestivum; identical to SEQ ID NO: 2339
  source 1..1209: mol_type = genomic DNA

SEQ ID NO: 2342 - DNA, 1209 bp, Triticum aestivum; identical to SEQ ID NO: 2339
  source 1..1209: mol_type = genomic DNA

SEQ ID NO: 2343 - DNA, 1209 bp, Triticum aestivum; identical to SEQ ID NO: 2339
  source 1..1209: mol_type = genomic DNA

SEQ ID NO: 2344 - DNA, 1209 bp, Triticum aestivum; identical to SEQ ID NO: 2339
  source 1..1209: mol_type = genomic DNA

SEQ ID NO: 2345 - DNA, 1443 bp, Triticum aestivum
  source 1..1443: mol_type = genomic DNA
atgtgcaaggttcatgcaatggacaaggctgaggaggttcttcaacagatgcttgatagaagaattctgccagatgctgccacatataatagtctgatacatggatattatttattaggacagtgcgaagaggtggatcgggttctcaaggaaatgtgtagaaagagtgttcaaccaaatattgtaacttactatatacagatggattatctttgcaagagcggaaggtgcgcagaagctaggaaaatatttgattctatgatcggtttgggccaaaaaccagatgttactacctacagtattctactgcatgggtatgctatggaaaaatcttttcatgagatgcattgtctcattgatttgatggtagaaaatggtattgcaccagatcatcatgtctacaacatactcatatctgcatatgctaaagaagaaagggttggtgaggtagtgcatatatttacaaaaatgcggcagcaaggattgaaccctaatgtagcgaactatggagtggttgtaaacttgctttgcagcatgggccgaatggatgatgctatgtcccaatacaatcaaatgataactgaaggattactccctggtatcatacttttcagccaacttattagtggtttctgtacttgtggcaaatgggagaaggttcatgaactattttctgagatgttggatcgtggcatctatcccgacactgtgttcttcaacacaattatggatcatctttgcaaaaatggaagggttatggaagcccaggatctcttcgacctgatggtacacatgggtgtgaaacctgacgtgtgtacttatagcacactgataggtggatacttgttcgttggtaagatggatgaagtgagcaagttacttgacaatatggtctcaattggcatggatccagatgttatcacctatagcatactgattgatggttactgtaagaatggaaggatagatgatgcattggttgttttcagggaaatgttggccgggaaggttaagccttgcattatcacttttaatattatgattggtgcgttgcttaaaggtggcagaaaggaagaggctaaagatttgtttgatggtatctgggccaaaggattagtgcccaccgttgttacatatagcttaatgatacaaaaacttatagaagaaggttctctacaggagtctgatgatctattcctttctatggagaagaatggttgtcctgccaattcccgcatgctaaatgctatagttagaaggttacttcagaaaggggagatgcccagggctgggacttatttgtctaaaattgatgagaggaatttcacccttgaagcttccacaactagcttgttgactgcacttgcttcagtggggaaatgtcaggaatataaggggttactgcctgaaaaatatcactcttttctggaacaaggcactgat

SEQ ID NO: 2346 - DNA, 1443 bp, Triticum aestivum; identical to SEQ ID NO: 2345
  source 1..1443: mol_type = genomic DNA

SEQ ID NO: 2347 - DNA, 1443 bp, Triticum aestivum; identical to SEQ ID NO: 2345
  source 1..1443: mol_type = genomic DNA

SEQ ID NO: 2348 - DNA, 1443 bp, Triticum aestivum; identical to SEQ ID NO: 2345
  source 1..1443: mol_type = genomic DNA

SEQ ID NO: 2349 - DNA, 1443 bp, Triticum aestivum; identical to SEQ ID NO: 2345
  source 1..1443: mol_type = genomic DNA

SEQ ID NO: 2350 - DNA, 1443 bp, Triticum aestivum; identical to SEQ ID NO: 2345
  source 1..1443: mol_type = genomic DNA

SEQ ID NO: 2351 - DNA, 1446 bp, Triticum aestivum
  source 1..1446: mol_type = genomic DNA
atgagccgccgctttgtccccgtcggcagacgcatcttagagcagaacatcaaggctcggtaccacgccggagacattggcaccgaggacgcactccacctgtttgacgaattgctccaggttgctgggcgctcctcgatccatgccatcaactgcctcctcaccgttgtctgccgtgattgccctgcgctcggcgtctccctcttcaaccgcgtcgcaaggtccaaggtggcgcccagcagtatcacctatgccattctggtcgactgctgctgccgcgctggccgcctggaccttggacacactgccatgggacacatcatcaagacgggatttgcagcagaagccatcgtcaatttcaaccacctactcaaggccatctgtgcagagaacaagaccagctatgcaatggacatcgtactccgaataatgcccatgtttaactgtgtacccaacattttctcctacagcattcttttcaagggtctctgcaacgagaagaggagtcaagaggctctcgagctgattaacatgatggttgaggatggaggtagctgccgacctgatgtggtgacctataacaccgtgattgatggcttgttgaaagagggtgaggtaggcaaggcttacagcctattttgtgaaatgctgcgtcagggggtatcgccggatgctgtgacctgtagttcaatcatctctggcatgtgcaagcttcatgcaatggacaaggctgaggaggttcttcaacagatgcttgatagaagaattctgccaaatgttgccacatataatagtctgatacatggatattatttattaggacagtgcgaagaggtggatcggattttcaaggaaatgtctagaaatggtgttcaaccaaatgttgtaacttacaatatacagatggattatctttgcaagagcggaagatgcgcagaagctaggaagatttttgattctatgatcagtttgggccaaaaaccgaatgtttatacctacagcgttctactgcatgggtatgctatggaaaaatcttttcatgatatgcattgtctcattgatttgatggtagaaaatggtattgcaccagatcatcatgtctacaacatactcatatctgcatatgctaaagaagaaatggttggtgtggtaatgcatatatttacgaaaatgcggcagcaaggattgaaccctgatgcagtgagctacggagcagtaatagacttactttgcagcatgggccgaatggatgatgctatgtcccaatacaatcaaatgataactgaaggattactccctggtatcatagttttcaccccccttattagtggtttctgttcttgtggcaaatgggagaaggttgatgaactattttctgagatgttggatcgcggcatttgtcccaacagtgttcttcaacacaattatggaccgcctttgcaaaaa

SEQ ID NO: 2352 - DNA, 1446 bp, Triticum aestivum; identical to SEQ ID NO: 2351
  source 1..1446: mol_type = genomic DNA

SEQ ID NO: 2353 - DNA, 1446 bp, Triticum aestivum; identical to SEQ ID NO: 2351
  source 1..1446: mol_type = genomic DNA

SEQ ID NO: 2354 - DNA, 1446 bp, Triticum aestivum; identical to SEQ ID NO: 2351
  source 1..1446: mol_type = genomic DNA

SEQ ID NO: 2355 - DNA, 1446 bp, Triticum aestivum; identical to SEQ ID NO: 2351
  source 1..1446: mol_type = genomic DNA

SEQ ID NO: 2356 - DNA, 1446 bp, Triticum aestivum; identical to SEQ ID NO: 2351
  source 1..1446: mol_type = genomic DNA

SEQ ID NO: 2357 - DNA, 1470 bp, Triticum aestivum
  source 1..1470: mol_type = genomic DNA
atgtcgcgcctccatccccgctacttctccagctccatctcctcactcgccgacgagctgctgagcgaactccaccatcatctgggctcagggacgctcagtccgcagctcgcacaccaactgttcgacgaaatgctgcgccaacccgtcccagtatcatcgcgtgcactcaatggcttatttgctgccctcgcgcgtacgccaccctccaccacctgcacagatagccctgccctcgccatcaatctcttcaaccgcatggcccgagcaggtcgcggcagggtgatagcacccagcagtcacacctacagcatactaattgaatgctgctgcctcgcgcgccgtccggaccttgggccttccttcttcgctcacctcctcaagacaggcgtcacggcagacgtcgtcatcttcagtggcttattcaagtgcctctgtgacatgaagcgggcagacgaggctcaggacatactgctccataggatacctgacgacctgcatgatgccatctcctactcagtaattctcaagagcttctgcaacaatggattgagccagcgtgcgcttgacctgctccggatgatggccaaaaaaggtgctgaccactccccgggtgtgtttgcatacagcatggtaatccatggcttctttaaagagggtgaagtaagcaaagcatgcgatctattccatgaaatgatacaacaggggcctgtgcctaatgtggtgacgtacaactctgttatcgatgcgctatgcaaagcaagagcaatggacaaggcagaggtggttcttcgatcaatggttcataatggtgtccaaccaaatgttgtgacatataatagcttgatccaaggatattcaactgtgggacagttgaaagaagtcgctaggttgttgaaagtgatgagaagccaaggtgttatgccaagtgttgttacctacaactcactcatgggctacctttgcaagcatggaagaatcaaagaagctgaggaaatatttttttccatgaccctgaatggccgaaaaccagatatagtctcatactctattatgctccgtgggtacgctatagaaggatcccttgttaaaatgattgatctctgtgagctgatggcaagagatggagttgtacctgaactccattgtttcaacatactgattagtgcatatgctaagtatggaatgatggatgtggctatgcttttctttgaagacatgttgaagcaggggctgaaccctggtgatttcatttatttaactgtgatatctgcattttgtaagatgggcaggatggatgatgctctggaaaaattcaatgagatgattgataggggggtaccacttgacacaaaaatttacatgtgcatgattgagggttatttgaatcgtggtgattctgtgaaagccgaggaatttattaccaaaatgaagagtagggatattcgtcataggccgcggaagggtaat

SEQ ID NO: 2358 - DNA, 1470 bp, Triticum aestivum; identical to SEQ ID NO: 2357
  source 1..1470: mol_type = genomic DNA

SEQ ID NO: 2359 - DNA, 1470 bp, Triticum aestivum; identical to SEQ ID NO: 2357
  source 1..1470: mol_type = genomic DNA

SEQ ID NO: 2360 - DNA, 1470 bp, Triticum aestivum; identical to SEQ ID NO: 2357
  source 1..1470: mol_type = genomic DNA

SEQ ID NO: 2361 - DNA, 1470 bp, Triticum aestivum; identical to SEQ ID NO: 2357
  source 1..1470: mol_type = genomic DNA

SEQ ID NO: 2362 - DNA, 1470 bp, Triticum aestivum; identical to SEQ ID NO: 2357
  source 1..1470: mol_type = genomic DNA

SEQ ID NO: 2363 - DNA, 888 bp, Triticum aestivum
  source 1..888: mol_type = genomic DNA
atggccaaaaaaggtgctgaccactcccccaacgtggtgtcatacaacacggtaatcaatggcttctttaaggagggcgaagtaagcaaagcatgcaatctattccacgaaatgatacaacagggggttgtgcctaatgaggtgacatatagctccattatcaatgcactatgcaaagcaagagcaatggataaggcagaggtgatccttcgacatatggttcatagtggtgtccaaccacatgataggatatataatatcctgatccatggatttttaacttcgggtcagctgaaagaagcctttaggctgttgaaactgatgacaagccaaggtgttatgccaaaccttgttacctgcaactcagtcatgacctaccattgcaagaatggaagagtaaaagaagctgcggaaatattttattccatggctgtgaagggccgaaaacctaatgtcatctcatactctattatgcttcatgggtacgcgacagaaggatcccttgttgaaatgattgatctctgtgagctgatggcaagagatggagttgtacccgaccgctctgttttcaacatactgattaaggcatatgctaaacatggaatgatcgatgtggctatgcttttctttgatgaaatgttgaagcagggggtgaaccctaatgatatcacatatttaactctgatatctgcattttgcaagatgggcagaatggatgatgccatgatcaaattcaatgagatgattgatatgggaataccacatgatacaactgtttacatgtgcatgattgagggttatttgaatcatggtgattccgtgaaagccaaggaatttattactaaaatgaagagcagggatgtttgtcatagcccgcggaagggtaat

SEQ ID NO: 2364 - DNA, 888 bp, Triticum aestivum; identical to SEQ ID NO: 2363
  source 1..888: mol_type = genomic DNA

SEQ ID NO: 2365 - DNA, 888 bp, Triticum aestivum; identical to SEQ ID NO: 2363
  source 1..888: mol_type = genomic DNA

SEQ ID NO: 2366 - DNA, 888 bp, Triticum aestivum; identical to SEQ ID NO: 2363
  source 1..888: mol_type = genomic DNA

SEQ ID NO: 2367 - DNA, 777 bp, Triticum aestivum
  source 1..777: mol_type = genomic DNA
atgatacaacagggggttgtgcctaatgaggtgacatatagctccattatcaatgcactatgcaaagcaagagcaatggataaggcagaggtgatccttcgacatatggttcatagtggtgtccaaccacatgataggatatataatatcctgatccatggatttttaacttcgggtcagctgaaagaagcctttaggctgttgaaactgatgacaagccaaggtgttatgccaaaccttgttacctgcaactcagtcatgacctaccattgcaagaatggaagagtaaaagaagctgcggaaatattttattccatggctgtgaagggccgaaaacctaatgtcatctcatgctctattatgcttcatgggtacgcgacagaaggatcccttgttgaaatgattgatctctgtgagctgatggcaagagatggagttgtacccgaccgctctgttttcaacatactgattaaggcatatgctaaacatggaatgatcgatgtggctatgcttttctttgatgaaatgttgaagcagggggtgaaccctaatgatatcacatatttaactctgatatctgcattttgcaagatgggcagaatggatgatgccatgatcaaattcaatgagatgattgatatgggaataccacatgatacaactgtttacatgtgcatgattgagggttatttgaatcatggtgattccgtgaaagccaaggaatttattactaaaatgaagagcagggatgtttgtcatagcccgcggaagggtaat

SEQ ID NO: 2368 - DNA, 633 bp, Triticum aestivum
  source 1..633: mol_type = genomic DNA
atgtcgcgcctccacccccgctacttctccagctccatcccctcactcgccgacgagctgctgagcgaactccaccatcatctgggctctgggacgctcagtccgcagctcgcacaccaactgttcgacgaaatgctgcgccaacccgtcccagtatcatcgcgtgcgctcaatggcttatttgctgccctcgcgcgtacgccgccctccaccacctgcacagatagccctgccctcgccatcaatctcttcaaccgcatggcccgagcaggtcgcggcagggtgatagcacccagcagtcacacctacagcatactaattgaatgctgctgcctcgcgcgccgtccggaccttgggccttccttcttcgctcacctcctcaagacaggcgtcacggtagacgtcgtcaccttcagtggcttattcaagtgcctctgtgacatgaagcgcacggaggaggctctggatgtgctgcttcataaggtgcctcacaacctgcctaatgtcatctcctactcagtagttgtgaagagcttctgcgacaatggtaggagccagcttgcgcttgacctgctccgtataatggccaaaaaaggtgctgaccaccccccaacgtggtgtcatacaacacgg

SEQ ID NO: 2369 - DNA, 1470 bp, Triticum aestivum
  source 1..1470: mol_type = genomic DNA
atgtcgcgcctccacccccgctacttctccagctccatcccctcactcgccgacgagctgctgagcgaactccaccatcatctgggctctgggacgctcagtccgcagctcgcacaccaactgttcgacgaaatgctgcgccaacccgtcccagtatcatcgcgtgcgctcaatggcttatttgctgccctcgcgcgtacgccgccctccaccacctgcacagatagccctgccctcgccatcaatctcttcaaccgcatggcccgagcaggtcgcggcagggtgatagcacccagcagtcacacctacagcatactaattgaatgctgctgcctcgcgcgccgtccggaccttgggccttccttcttcgctcacctcctcaagacaggcgtcacggtagacgtcgtcaccttcagtggcttattcaagtgcctctgtgacatgaagcgcacggaggaggctctggatgtgctgcttcataaggtgccccacaacctgcctaatgtcatctcctactcagtagttgtgaagagcttctgcgacaatggtaggagccagcttgcgcttgacctgctccgtataatggccaaaaaaggtgctgaccactcccccaacgtggtgtcatacaacacggtaatcaatggcttctttaaggagggcgaagtaagcaaagcatgcaatctattccacgaaatgatacaacagggggttgtgcctaatgaggtgacatatagctccattatcaatgcactatgcaaagcaagagcaatggataaggcagaggtgatccttcgacatatggttcatagtggtgtccaaccacatgataggatatataatatcctgatccatggatttttaacttcgggtcagctgaaagaagcctttaggctgttgaaactgatgacaagccaaggtgttatgccaaacgttgttacctgcaactcagtcatgacataccattgcaagaatggaagagtaaaagaagctgcggaaatattttattccatggctgtgaagggccgaaaacctaatgtcatctcatactctattatgcttcatgggtacgcgacagaaggatcccttgttgaaatgattgatctctgtgagctgatggcaagagatggagttgtacccgaccgctctgttttcaacatactgattaaggcatatgctgaacatggaatgatcgatgtggctatgcttttctttgatgaaatgttgaagcagggggtgaaccctaatgatatcacatatttaactctgatatctgcattttgcaagatgggcagaatggatgatgccatgatcaaattcaatgagatgattgatatgggaataccacatgatacaactgtttacatgtgcatgattgagggttatttgaatcatggtgattccgtgaaagccaaggaatttattactaaaatgaagagcagggatgtttgtcatagcccgcggaagggtaat

SEQ ID NO: 2370 - DNA, 888 bp, Triticum aestivum; identical to SEQ ID NO: 2363
  source 1..888: mol_type = genomic DNA

SEQ ID NO: 2371 - DNA, 1479 bp, Triticum aestivum
  source 1..1479: mol_type = genomic DNA
atgtcacgcctccagccccgctatttctccagctccgtgtcctcacgcgccaacgaactgctgagcgaattccaccatcatctgggctccggaacgctctggccggagctcgcgcgccaactgttcgaccaaatgctgcgccaacctgtcccggtatcagtacgtgcactcaacggcttatttgctgccctcgcgcgtgcgccgccctcaaccgcctgcaccaatgcccctgccctcgtcattgatctcttcaaccgcatggcccaagcaggtcgtcgccaggtgacagcacccaccatttacacctacagcatacttattgagtgctgccaccgagcatgccgcccagacctagggcttgccttcttcggccgcctcctccagacaggcatcacgacggacgtcattacctacagcagcttactcaagtgcctctgtgacatgaagcgcacggaggaggctttgggcgtgctgctccacaggatgcccaacgacctgcctaatgtcatctcctactcagtaattctcaagagcttctgcgacagtggtaggagccagcttgcgcttgatctgctccgaatgatggccgaaaaaggatctgaccactcccccagcgtggtgtcatacagcgtggtaatcgatggtttcttcaaggagggtgaaataagcaaagcatgtgatctgttccatgaaatgatgcagcagggggttgtgcccgatgtggtgatgtatacctccattatcaatgcgctatgcaaagcaagagcaatggacaaggcagaggtggttcttcgatcaatggttcataatggtgtccaaccagatgctgtgacatatactagcctgatccaaggatattcaactttaggccagttgaaagaagtcgctaggttgttgaaagtgatgagaagccaaggtgttatgccagacgttgttacctgcaccttagtcatggactacctttgcaagcatggaagaaccaaagaagctcaggaaatattttattccatggctgtgaatgggcaaaaacctgatattgtcgcatactgtactatgctctatgggtactctatagaaggatcccttgttgatatgatcgatctctgtgagctgatggcaagagatggagttgtacccaacctccgttgtttcaacatactgattaatgcatatgctaagcatggaatgatggatgtggccctgcttttcttcgaagatatgttgaagcagggggtgaagcctaatgaattcacttatttaactgtgatatctgcattttgcaagatgggcaggatggatgatgcgatggaaaaattccgtgagatgattgatatgggagtaccagttgacacagaagtttacatgtgcatgattgagggttatttgaatcacggtgactccgtgaaagcgaaggaattgattactgaaatgaagaacacggatattcgtcataagccgtggaagggtaatggaagaaca

SEQ ID NO: 2372 - DNA, 1479 bp, Triticum aestivum; identical to SEQ ID NO: 2371
  source 1..1479: mol_type = genomic DNA

SEQ ID NO: 2373 - DNA, 1479 bp, Triticum aestivum; identical to SEQ ID NO: 2371
  source 1..1479: mol_type = genomic DNA

SEQ ID NO: 2374 - DNA, 1479 bp, Triticum aestivum; identical to SEQ ID NO: 2371
  source 1..1479: mol_type = genomic DNA

SEQ ID NO: 2375 - DNA, 1479 bp, Triticum aestivum; identical to SEQ ID NO: 2371
  source 1..1479: mol_type = genomic DNA

SEQ ID NO: 2376 - DNA, 1479 bp, Triticum aestivum; identical to SEQ ID NO: 2371
  source 1..1479: mol_type = genomic DNA

SEQ ID NO: 2377 - DNA, 1134 bp, Triticum aestivum
  source 1..1134: mol_type = genomic DNA
atgccgcccagatcttggcctgccttcttcggccgcctcctcaagacaggcatcacgaaggacgtcgttacctacagcagcttattcaagtgcctctgcgacatgaagcgcacagaggaggctctgaacgtgctgctccataagatgcccgacgacctgcctaatgtcatctcctactcagtgattctcaagagcttctgcgacagtggtaggagccagctcgcgcttgacctgctccggatgatggccgaaaaaggatctggccactcccccagcgtggtgtcatacagcatggtaatcgatggtttcttcaaggagggtgaaataagcaaagcatgcgatctattccatgaaatgatacaacatggggttgtgcctactgtggtgacatataactccattattgatgcgcggtgcaaagcaagagcaatggacaaggcagaggtggttcttcgatcaatggttcataatggtgtccaaccagatgctgtgacatataattgcttgatccaaggatattcaactttgggccagttgaaagaagtcgctaggttgttgaaagtgatgagaagccaaggtgttctaccagatgttgttacctacaactcactcatgacctgcctttgcaagaatggaagattaaaggaagctgtagtttttttttattccatggccatgaacggccaaaaacctgatgtcatctcatactctgttttgctccatgggtacgctaaagaaggatccctcattgatatgattgatctctgtgagcggatggcaagagatggagttgtacccaacctccattgtttcaacatactgattagtgcatatgctaagtatggaaggatggatgtggctatgcttttcttcgaagacatgttgaagaaggggttgaaccctaatgaattcatttatttaactgtcatatctgcattttgcaagatgggcaggatggatgatgctctggaaaaattcaatgagatgattgatagaggagtaccacttgacataaaaatttacatgtgcatgattgagggttatttgaatcatggtgattctgtgaaagccgaggaatttattaccaaaatgaagagcagggatattcatcataggccgcggaagggtaattgt

SEQ ID NO: 2378 - DNA, 1134 bp, Triticum aestivum; identical to SEQ ID NO: 2377
  source 1..1134: mol_type = genomic DNA

SEQ ID NO: 2379 - DNA, 1134 bp, Triticum aestivum
  source 1..1134: mol_type = genomic DNA
atgccgcccagatcttggcctgccttcttcggccgcctcctcaagacaggcatcacgaaggacgtcgttacctacagcagcttattcaagtgcctctgcgacatgaagcgcacagaggaggctctgaacgtgctgctccataagatgcccgacgacctgcctaatgtcatctcctactcagtgattctcaagagcttctgcgacagtggtaggagccagctcgtgcttgacctgctccggatgatggccgaaaaaggatctggccactcccccagcgtggtgtcatacagcatggtaatcgatggtttcttcaaggagggtgaaataagcaaagcatgcgatctattccatgaaatgatacaacatggggttgtgcctactgtggtgacatataactccattattgatgcgcggtgcaaagcaagagcaatggacaaggcagaggtggttcttcgatcaatggttcataatggtgtccaaccagatgctgtgacatataattgcttgatccaaggatattcaactttgggccagttgaaagaagtcgctaggttgttgaaagtgatgagaagccaaggtgttctaccagatgttgttacctacaactcactcatgacctgcctttgcaagaatggaagattaaaggaagctgtagtttttttttattccatggccgtgaacggccaaaaacctgatgtcatctcatactctgttttgctccatgggtacgctaaagaaggatccctcattgatatgattgatctctgtgagcggatggcaagagatggagttgtacccaacctccattgtttcaacatactgattagtgcatatgctaagtatggaaggatggatgtggctatgcttttcttcgaagacatgttgaagaaggggttgaaccctaatgaattcatttatttaactgtcatatctgcattttgcaagatgggcaggatggatgatgctctggaaaaattcaatgagatgattgatagaggagtaccacttggcataaaaatttacatatgcatgattgagggttatttgaatcatggtgattctgtgaaagccgaggaatttattaccaaaatgaagagcaggggtattcgtcataggccgcggaagggtaattgt

SEQ ID NO: 2380 - DNA, 1473 bp, Triticum aestivum
  source 1..1473: mol_type = genomic DNA
atgtcacgcctccaggtccgctctctctccagctccttctcctcacgcgcctacgagctgctgaacgaactcgacggccgtctgggctccgggacgctcagcccagagcccgcgcgcgaactgttcgacgaaatgctgcgccaaccagtcccagtatcagtacgtgcactcaacggcttatttgctgccctttcgcgtgcgccgccctccaccatctacaccaatgcccctgccctcgccattgatctcttcaaccgcatggcccaagcaggccgtcgccaggtgacagcacctgacatttacacctacaacatactaattgactgctgccaccgagcatgccgcccggatcttgggcctgccttcttcggccgcctcctcaagacaggcatcacgaaggacgtcgttacctacagcagcttattcaagtgcctctgcgacatgaagcgcacagaggaggctctgaacgtgctgctccataagatgcctgacgacctgcctgatgccatctcctactcagtgattctcaagagcttctgcgacagtggtaggagccagctcgcgcttgacctgctccggatgatgaccgaaaaaggatctggccactcccccagcgtggtgtcatacagcatggtaattgatggtttcttcaaggagggtgaaataagcaaagcatgcgatctattccatgacatgatacaacatggggttgtgcctactgtggtgacatataactccattattgatgcgcggtgcaaagcaagagcaatggacaaggcagaggtggttcttcgatcaatggttcataatggtgtccaaccagatgctgtgacatataattgcttgatccaaggatattcaactttgggccagttgaaagaagtcgctaggttgttgaaagtgatgagaagccaaggtgttctaccagatgttgttacctacaactcactcatgacctgcctttgcaagaatggaagattcaaggaagctgtagaaattttttattccatggccgtgaacggccaaaaacctgatgtcatctcatactctgttttgctccatgggtacgctaaagaaggatccctcgttgatatgattgatctctgtgagcggatggcaagagatggagttgtacccaacctccattgtttcaacatactgattagtgcatatgctaagtatggaaggatggatgtggctatgcttttcttcgaagacatgttgaagaaggggttgaaccctaatgaattcatttatttaactgtcatatctgcattttgcaagatgggcaggatggatgatgctctggaaaaattcaatgagatgattgatagaggagtaccacttgacataaaaatttacatgtgcatgattgagggttatttgaatcatggtgattctgtgaaagccgaggaatttattaccaaaatgaagagcagggatattcgtcataggccgcggaagggtaattgt

SEQ ID NO: 2381 - DNA, 1134 bp, Triticum aestivum; identical to SEQ ID NO: 2377
  source 1..1134: mol_type = genomic DNA

SEQ ID NO: 2382 - DNA, 1134 bp, Triticum aestivum; identical to SEQ ID NO: 2377
  source 1..1134: mol_type = genomic DNA

SEQ ID NO: 2383 - DNA, 1134 bp, Triticum aestivum; identical to SEQ ID NO: 2379
  source 1..1134: mol_type = genomic DNA

SEQ ID NO: 2384 - DNA, 1470 bp, Triticum aestivum
  source 1..1470: mol_type = genomic DNA
atgtcacgccttcaggtccgctcttactctagccccgtttcctcacgcgccaacgatctgctgaccgaactccacggccatatgggcttcgggacgctcaggccagagctcgcgcaccaactgttcgacgaaatgttgggccaacctgtcccagtatcggtgcgtgcactcaacggcttatttgctgcactcgcgcgtgcgccgccctcaaccgcctgcactgatggccctgccctcgccgttgatctcttcaaccatatggcccgagcaggccgccgctggatgacagcacccaccattcacacctacaacatactaattgactgctgccaccgagcatgccgcccagacctagggcccgccttcttcggctgcctcctcaagacaggagtcacaacgagccccattacctacagcagcctattcaagtgcctctgtgacatgaagcgcacagaggaggctctggacatactgctccataggatagccgacgacctgcctaatgtcatctcctactcagtgattctcaagagtttctgcgacaatgggaggagccagcttgcgcttgacctgctccgggtgatggccaaaaaaggtggtgaccgctctcccgacgtgatgttatacaacatggtaatcgatggcttctttaaggagggtgaagtaagcaaagcatgcgatctattccatgaaatgatacaacagggggtagtgcctactgaggtgacatatagctccattatcaatgcgctatgcaaagcaagagcaatggacaaagcagaggtggtccttcgacatatggttcataatggtgtccaaccagatgttgtgacatatactagcctgatcaaaggatattcaactttaggccagttaaaagaagtcgctaggttgttgaaagtaatgagaagccaaggtgttatgccaggcattgttacctataccttagtcatggactacctttgcaagcatggaagaatcaaagaagctgaggaaatattttattccatggccgtgaatggccaaaaacgagatacggtctcatactctattatgctccatgggtacgctatagaaggatcccttgttcaaatgattgatctctgtgagctgatggcaagagatggagttgtacctgacctccgttgtttcaacatactgattaatgcatatgctaagtatggcatgatggatgcggccatgcttttctttgaagacatgttgaagcagggtgtgaagcctaatgaattcacttatttaactgtgatatctgcattttgcaagatgggcaggatggatgatgcgatggaaaaattcaatgagatgattgatatgggagtaccacttgacacagaagtttacatgtgcatggttgagggttattttaatcttgatgattccataaaagccaaggaatttattaccaaattgaagaacagggatattcatcataggccgcggaaaggtaat

SEQ ID NO: 2385 - DNA, 1470 bp, Triticum aestivum; identical to SEQ ID NO: 2384
  source 1..1470: mol_type = genomic DNA

SEQ ID NO: 2386 - DNA, 1470 bp, Triticum aestivum; identical to SEQ ID NO: 2384
  source 1..1470: mol_type = genomic DNA

SEQ ID NO: 2387 - DNA, 1470 bp, Triticum aestivum; identical to SEQ ID NO: 2384
  source 1..1470: mol_type = genomic DNA

SEQ ID NO: 2388 - DNA, 1470 bp, Triticum aestivum; identical to SEQ ID NO: 2384
  source 1..1470: mol_type = genomic DNA

SEQ ID NO: 2389 - DNA, 1470 bp, Triticum aestivum
  source 1..1470: mol_type = genomic DNA
atgtcacgccttcaggtccgctcttactctagccccgtttcctcacgcgccaacgatctgctgaccgaactccacggccatatgggcttcgggacgctcaggccagagctcgcgcaccaactgttcgacgaaatgttgggccaacctgtcccagtatcggtgcgtgcactcaacggcttatttgctgcactcgcgcgtgcgccgccctcaaccgcctgcactgatggccctgccctcgccgttgatctcttcaaccatatggcccgagcaggccgccgctggatgacagcacccaccattcacacctacaacatactaattgactgctgccaccgagcatgccgcccagacctagggcccgccttcttcggctgcctcctcaagacaggagtcacaacgagccccattacctacagcagcctattcaagtgcctctgtgacatgaagcgcacagaggaggctctggacatactgctccataggatagccgacgacctgcctaatgtcatctcctactcagtgattctcaagagtttctgcgacagtgggaggagccagcttgcgcttgacctgctccgggtgatggccaaaaaaggtggtgaccgctctcccaacgtgatgtcatacaacatggtaatcgatggcttctttaaggagggtgaagtaagcaaagcatgcgatctattccatgaaatgatacaacagggggtagtgcctactgaggtgacatatagctccattatcaatgcgctatgcaaagcaagagcaatggacaaagcagaggtggtccttcgacatatggttcataatggtgtccaaccagatgttgtgacatatactagcctgatcaaaggatattcaactttaggccagttaaaagaagtcgctaggttgttgaaagtaatgagaagccaaggtgttatgccagacattgttacctataccttagtcatggactacctttgcaagcatggaagaatcaaagaagctgaggaaatattttattccatggccgtgaatggccaaaaacgagatacggtctcatactctattatgttccatgggtacgctatagaaggatcccttgttcaaatgattgatctctgtgagctgatggcaagagatggagttgtacctgacctccgttgtttcaacatactgattaatgcatatgctaagtatggcatgatggatgcggccatgcttttctttgaagacatgttgaagcagggtgtgaagcctaatgaattcacttatttaactgtgatatctgcattttgcaagatgggcaggatggatgatgcgatggaaaaattcaatgagatgattgatatgggagtaccacttgacacagaagtttacatgtgcatggttgagggttattttaatcttgatgattccataaaagccaaggaatttattaccaaattgaagaacagggatattcatcataggccgcggaaaggtaat

SEQ ID NO: 2390 - DNA, 702 bp, Triticum aestivum
  source 1..702: mol_type = genomic DNA
atggacaaggcagaggtggttcttcgatcaatggttcataatggtgcccaaccagatgctgtgacatataatagcttgatccaaggatattcaactttgggacagttgaaagaagtcgctaggttgttgaaagtgatgagaagccaaggtgttatgccaagcgttgttacctgcaactcactcatgacctgcctttgcaagaatggaagattcaaggaagctgtagaatttttttattccatggccgtgaacggccaaaaacctgatgtcatctcatactctgttttgctccatgggtacgctaaagaaggatccctcattgatatgattgatctctgtgagcggatggcaagagatggagttgtacccgacctccattgtttcaacatactgattagtgcatatgctaagtatggaaggatggatgtggctatgcttttcttcgaagacatgttgaagaaggggttgaaccctaatgaattcatttatttaactgtcatatctgcattttgcaagatggacaggatggatgatgctctggaaaaattcaatgagatgattgataggggagtaccacttgacacaaaaatttacatgtgcatgattgagggttatttgaaccatggtgattctgtgaaagccgaggaatttattaccaaaatgaagagcagggatattcgtcataggccgtggaagggtaat

SEQ ID NO: 2391 - DNA, 1212 bp, Triticum aestivum
  source 1..1212: mol_type = genomic DNA
atggcccgagcaggccgtcgccaggcgacagcacccaccatttacacctacagcatactaatggagtgttgccaccgagcatgccgcccagacctagggcttgccttcttcggccgcctcctcaagacaggcatcccgacaaacatcattgactacagcagcttgttcaagtgcctctgtgacatgaagcgcacagaggaggctctgaacgtgctgctccataagatgcccgacgacctgcctaatgtcatctcatactcagtgattctcaagagcttctgcgacaatgggaggagccagcttgcgcttgatctgctccagatgatggccaaaaaaggcgctgaccactcccccgacgtgatgtcatacaacatggtaattgatggcttctttaaggagggtgaagtaagcaaagcatgcgatctattccaagaaatgatacgacaggggattgtgccaactgaggtgacatatagctccattatcaatgcgctatgcaaagcaagagcaatggacaaggcagaggtggttcttcgatcaatggttcataatggtgcccaaccagatgctgtgacatataatagcttgatccaaggatattcaactttgggacagttgaaagaagtcgctaggttgttgaaagtgatgagaagccaaggtgttatgccaagcgttgttacctgcaactcactcatgacctgcctttgcaagaatggaagattcaaggaagctgtagaatttttttattccatggccgtgaacggccaaaaacctgatgtcatctcatactctgttttgctccatgggtacgctaaagaaggatccctcattgatatgattgatctctgtgagcggatggcaagagatggagttgcacccgacctccattgtttcaacatactgattagtgcatatgctaagtatggaaggatggatgtggctatgcttttcttcgaagacatgttgaagaaggggttgaaccctaatgaattcatttatttaactgtcatatctgtattttgcaagatgggcaggatggatgatgctctggaaaaattcaatgagatgattgataggggagtaccacttgacacaaaaatttacatgtgcatgattgagggttatttgaaccatggtgattctgtgaaagccgaggaatttattaccaaaatgaagagcagggatattcgtcataggctgtggaagggtaat

SEQ ID NO: 2392 - DNA, 801 bp, Triticum aestivum
  source 1..801: mol_type = genomic DNA
atgtcacgctttcaggtccgctctttctctagctccgtttcctcacgcgcccacgaactgctggacgaactccacgaccatctgggcttcagaacgctcaggccagagctcgcgcaccaactgttcgacgaaatgctgcgccaacctgtcccagtatcagctcgtgcactcagcggcttatttgctgcacttgcgcgtgcgccgccctcacctgcgtgcaccgatagccctgccctcgccattgatctgttcaaccgcatggcccgagcaggccgtcgccaggcgacagcacccaccatttacacctacagcatactaatggagtgttgccaccgagcatgccgcccagacctagggcttgccttcttcggccgcctgctcaagacaggcatcaagatggatggcattacctacagcagcttgttcaagtgcctctgtgacatgaagcgcacagaggaggctctgaacgtgctgttccataagatgcccgacgacctgcctaatgtcatctcatactcagtgattctcaagagcttatgcgacaatgggaggagccagcttgcgcttgatctgctccagatgatggccaaaaaaggcgctgaccactcccccgacgtgatgtcatacaacatggtaattgatggcttctttaaggagggtgaagtaagcaaagcatgcgatctattccaagaaatgatacgacaggggattgtgcctactgaggtgacatatagctccattatcaatgcgctatgcaaagcaagaggacaaggcagaggtggttcttcgatcaatggttca

SEQ ID NO: 2393 - DNA, 720 bp, Triticum aestivum
  source 1..720: mol_type = genomic DNA
atgcgctatgcaaagcaagaggacaaggcagaggtggttcttcgatcaatggttcataatggtgcccaactagatgctgtgacatataatagcttgatgcaaggatattcaactttgggacagttgaaagaagtcgctaggttgttgaaagtgatgagaagccaaggtgttatgccaagcgttgttacctacaactcactcatgacctgcctttgcaagaatggaagattcaaggaagctgtagaatttttttattccatggccgtgaacggccaaaaacctgatgtcatctcatactctgttttgctccatgggtacgctaaagaaggatccctcattgatatgattgatctctgtgagcggatggcaagagatggagttgtacccgacctccattgtttcaacatactgattagtgcatatgctaagtatggaaggatgggtgtggctatgcttttcttcgaagacatgttgaagaaggggttgaaccctaatgaattcatttatttaactgtcatatctgcattttgcaagatgggcaggatggatgatgctctggaaaaattcaatgagatgattgataggggagtaccacttgacacaaaaaattacatgtgcatgattgagggttatttgaaccatggtgattctgtgaaagctgaggaatttattaccaaaatgaagagcagggatattcgtcataggccgtggaagggtaat

SEQ ID NO: 2394 - DNA, 801 bp, Triticum aestivum
  source 1..801: mol_type = genomic DNA
atgtcacgctttcaggtccgctctttctctagctccgtttcctcacgcgcccacgaactgctggacgaactccacgaccatctgggcttcagaacgctcaggccagagctcgcgcaccaactgttcgacgaaatgctgcgccaacctgtcccagtatcagctcgtgcactcagcggcttatttgctgcacttgcgcgtgcgccgccctcacctgcgtgcaccgatagccctgccctcgccattgatctgttcaaccgcatggcccgagcaggccgtcgccaggcgacagcacccaccatttacacctacagcatactaatggagtgttgccaccgagcatgccgcccagacctagggcttgccttcttcggccgcctgctcaagacaggcatcaagatggatgtcattacctacagcagcttgttcaagtgcctctgtgacatgaagcgcacagaggaggctctgaacgtgctgttccataagatgcccgacgacctgcctaatgtcatctcatactcagtgattctcaagagcttatgcgacaatgggaggagccagcttgcgcttgatctgctccagatgatggccaaaaaaggcgctgaccactcccccgacgtgatgtcatacaacatggtaattgatggcttctttaaggagggtgaagtaagcaaagcatgggatctattccaagaaatgatacgacaggggattgtgcctactgaggtgacatatagctccattatcaatgcgctatgcaaagcaagaggacaaggcagaggtggttcttcgatcaatggttca

SEQ ID NO: 2395 - DNA, 1212 bp, Triticum aestivum
  source 1..1212: mol_type = genomic DNA
atggcccgagcaggccgtcgccaggcgacagcacccaccatttacacctacagcatactaatggagtgttgccaccgagcatgccgcccagacctagggcttgccttcttcggccgcctcctcaagacaggcatcccgacaaacatcattgactacagcagcttgttcaagtgcctctgtgacatgaagcgcacagaggaggctctgaacgtgctgctccataagatgcccgacgacctgcctaatgtcatctcatactcagtgattctcaagagcttctgcgacaatgggaggagccagcttgcgcttgatctgctccagatgatggccaaaaaaggcgctgaccactcccccgacgtgatgtcatacaacatggtaattgatggcttctttaaggagggtgaagtaagcaaagcatgcgatctattccaagaaatgatacgacaggggattgtgcctactgaggtgacatatagctccattatcaatgcgctatgcaaagcaagagcaatggacaaggcagaggtggttcttcgatcaatggttcataatggtgcccaaccagatgctgtgacatataatagcttgatccaaggatattcaactttgggacagttgaaagaagtcgctaggttgttgaaagtgatgagaagccaaggtgttatgccaagcgttgttacctgcaactcactcatgacctgcctttgcaagaatggaagattcaaggaagctgtagaatttttttattccatggccgtgaacggccaaaaacctgatgtcatctcatactctgttttgctccatgggtacgctaaagaaggatccctcattgatatgattgatctctgtgagcggatggcaagagatggagttgtacccgacctccattgtttcaacatactgattagtgcatatgctaagtatggaaggatggatgtggctatgcttttcttcgaagacatgttgaagaaggggttgaaccctaatgaattcatttatttaactgtcatatctgcattttgcaagatgggcaggatggatgatgctctggaaaaattcaatgagatgattgataggggagtaccacttgacacaaaaatttacatgtgcatgattgagggttatttgaaccatggtgattctgtgaaagccgaggaatttattaccaaaatgaagagcagggatattcgtcataggccgtggaagggtaat

SEQ ID NO: 2396 - DNA, 1470 bp, Triticum aestivum
  source 1..1470: mol_type = genomic DNA
atgtcacaatttcaggtccgctctttctctagctccgtttcctcacgcgcccacgagctgctggacgaactccacgaccacctgggcttcagaacgctcaggccagagctcgcgcaccaactgttcgacgaaatgctgtgccaacctgtcccagtatcagctcgtgcactcagcggcttatttgctgcacttgcgcgtgcgccgccctcacctgcgtgcaccgatagccctgccctcgccattgatctcttcaaccgcatggcccgagcaggccgtcgccaggcgacagcacccaccatttacacctacagcatactaatggagtgttgccaccgagcatgccgcccagacctagggcttgccttcttcggccgcctgctcaagacaggcatcaagacggatgtcattacctacagcagcttgttcaagtgcctctgtgacatgaagcgcacagaggaggctctgaacgtgctgttccataagatgcccgacgacctgcctaatgtcatctcatactcagtgattctcaagagcttctgcgacaatgggaggagccagcttgcgcttgatctgctccagatgatggccaaaaaaggcgctgaccactcccccgacgtgatgtcatacaacatggtaattgatggcttctttaaggagggtgaagtaagcaaagcatgcgatctattccaagaaatgatacgacaggggattgtgcctactgaggtgacatatagctccattatcaatgcgctatgcaaagcaagagcaatggacaaggcagaggtggttcttcgatcaatggttcataatggtgcccaaccagatgctgtgacatataatagcttgatccaaggatattcaactttgggacagttgaaagaagtcgctaggttgttgaaagtgatgagaagccaaggtgttatgccaagcgttgttacctgcaactcactcatgacctgcctttgcaagaatggaagattcaaggaagctgtagaatttttttattccatggccgtgaacggccaaaaacctgatgtcatctcatactctgttttgctccatgggtacgctaaagaaggatccctcattgatatgattgatctctgtgagcggatggcaagagatggagttgtacccgacctccattgtttcaacgtactgattagtgcatatgctaagtatggaaggatggatgtggctatgcttttcttcgaagacatgttgaagaaggggttgaaccctaatgaattcatttatttaactgtcatatctgcattttgcaagatgggcaggatggatgatgctctggaaaaattcaatgagatgattgataggggagtaccacttgacacaaaaatttacatgtgcatgattgagggttatttgaaccatggtgattctgtgaaagccgaggaatttattaccaaaatgaagagcagggatattcgtcataggccgtggaagggtaat

SEQ ID NO: 2397 - DNA, 801 bp, Triticum aestivum; identical to SEQ ID NO: 2392
  source 1..801: mol_type = genomic DNA

SEQ ID NO: 2398 - DNA, 801 bp, Triticum aestivum; identical to SEQ ID NO: 2392
  source 1..801: mol_type = genomic DNA

SEQ ID NO: 2399 - DNA, 720 bp, Triticum aestivum; identical to SEQ ID NO: 2393
  source 1..720: mol_type = genomic DNA

SEQ ID NO: 2400 - DNA, 801 bp, Triticum aestivum; identical to SEQ ID NO: 2392
  source 1..801: mol_type = genomic DNA

SEQ ID NO: 2401 - DNA, 801 bp, Triticum aestivum; identical to SEQ ID NO: 2394
  source 1..801: mol_type = genomic DNA

SEQ ID NO: 2402 - DNA, 780 bp, Triticum aestivum
  source 1..780: mol_type = genomic DNA
atgtcacgccttcaggtccgctctttctccagccccgtttcctcacgcgccaacgatctgctgaccgaactccacgcccatctgggcttcgggacgctcaggccagagctcgcgcaccaactgttcgacgaaatgctgcgccaacctgtcccagtatcagctcgtgcactcagcggcttatttgctgcactcgcgcgtgcgccgccctcaaccgcctgcactgatggccctgccctcgccatcgatctcttcaaccatatggccagagcaggccgccgctggatgacagcacccaccattcacacctacaacatactaattgactgctgccaccgagcatgccgcccagacctagggcctgccttcttcagccgcctcctcaagacaggcatcacaatgagcgtcattacctacagcagcttattcaagtgcctctgtgacatgaagcgcacggaggaggctttgggcgtgctgctccacaggatgcccgacgagctgcctgatgtcatctcctactcagtaattctcaagagcttctgcgacagtggtaggagccagcttgcgcttgatctgctccgaatgatggccgaaaaaggatctgaccactcccccagcgtggtgtcatacagcgtggtaatcgatggtttcttcaaggagggtgaaataagcaaagcatgtgatctgttccatgaaatgatgcagcagggggttgtgcccgatgtggtgatgtacacctccattatcaatgcgctatgcaaagcaagagcaatggacaaggca

SEQ ID NO: 2403 - DNA, 1470 bp, Triticum aestivum
  source 1..1470: mol_type = genomic DNA
atgtcacgccttcaggtccgctctttctccagccccatttcctcacgcgccaacgatctgctgaccgaactccacggccatctgggcttcgggacgctcaggccagagctcgcgcaccaactgttcgacgaaatgctgcgccaacctgtcccagtatcagcgcgtgcactcaacggcttatttgctgcactcgcgcgtgcgccgccctcaaccgcctgcactgatggccctgccctcgccgtcgatctcttcaaccatatggccagagcaggccgccgctggatgacagcacccaccattcacacctacaacatactaattgactgctgccaccgagcatgccgcccagacctagggcctgccttcttcagccgcctcctcaagataggcatcacaatgagcgtcattacctacagcagcttattcaagtgcctctgtgacatgaagcgcacggaggaggctttgggcgtgctgctccacaggatgcccgacgacctgcctgatgtcatctcctactcagtaattctcaagagcttctgcgacagtggtaggagccagcttgcgcttgatctgctccgaatgatggccgaaaaaggatctgatcactcccccagcgtagtgtcatacagtgtggtaatcgatggtttcttcaaggagggtgaaataagcaaagcatgtgatctgttccatgaaatgatgcagcagggggttgtgcccgatgtggtgatgtatacctccattatcaatgcgctatgcaaagcaagagcaatggacaaggcagaggtggttcttcgatcaatggttcataatggtgtccaaccagatgctgtgacatataatagcttgatccaaggatattcaactctgggacagttgaaagaactcgctaggttgttgaaagtgatgagaagccaaggtgttatgccaagcgttgttacctacaactcactcatgacctgcctttgcaagaatggaagattcaaggaagctgtagaaattttttatttgatggctatgaagggccaaaaacctgatctcatctcatactctattttgctccatgggtatgctaaagaaggatccctcattgatatgattgatctctgtgagcagatggcaagagatggagttgtacccgacctccattgtttcaacatactgattagtgcatatgctaagtatggaaggatggatgtggctatgcttttcttcgaagacatgttgaagaaggggttgaaccctaatgaaatcatttatttaactgtcatatctgcattttgcaagatgggcaggatggatgatgccctggaaaaattcaatgagatgattgataggggagtactacttgacacaaaaatttacatgtgcatgattgagggttatttgaaccatggtgattctgtgaaagccgaggaatttattaccaaaatgaagagcagggatattcgtcataggccgcggaagggtaac

SEQ ID NO: 2404 - DNA, 1452 bp, Triticum aestivum
  source 1..1452: mol_type = genomic DNA
atgtcgcgcctccagccccgctctttctccagccccgtctcctcacgagtcagcgagctgctggatgaattcaaatgtcatctgggttctgggacgctctggccggagctcgcgcaccaactgttcgacgaaatgctgcgccaacccgtcccggtttcagcacgcgcactcggcggcttattttctgccctcgcgcgtgcgcggccctcaaccgcctgtactgatggccccgccctcgccatcgatctcttcaaccgccaccggatagcacctgacatttacacctacaacatactaattgactgctgccaccgagcatgccgcccagacctagggcctgccttcttcggatgccttctcaagacaggcatcacgacggacgtcattacctacagcagtttattgcagtgcttctgtgacatgaagcggacagaggaagctctggacctgctgctccatattgtgagtgataacctgcctgatgccatctcctactcagtaattctcaagagcttctgcgacaacggaaggagccagtgtgcgcttgacctgctccagatgatggccaaaaaaggtgctgaccattcccccaacgtggtctcatacaacttggtaatcaatggtttctttaaggagggtgaaataagcaaagcatgtgatctgttccatgaaatgatacaacaagggtttgttcctgatgtggtgacatataactctgttattaatgcactgtgcaaagcaagagcaatggacaaggcagaggtggtccttcgatcgatggttcataatagtgtccaaccggatgttgtaacatataatagcttgatccaaggatttttaactacgggtcagctgaaagaagcctttaggttgttgaaagtgatgagaagccaaggtgttatgccaagcgttgttacttgcacctcggtcatggactacctttgcaagcatggaagaatcaaagaagctgaggaaacattttattccatggccgcgagtggccgaaaaccagatacagtctcatactctattatgctccttgggtacgctatagaaggatcccttgttaaaatgattgatctctgtgagatgatggcaagagatggagttgtacccgacctccgttgtttcaacatactgattaaggcatatgctaagtatggcaggatggatgtggccatgcttttctttgaagacatgttgaagcagggtgtgaagcctaatgaattcacttatttaactgtgatatctgcattttgcaagatgggcaggatggatgatgcgatggaaaaattcaatgagatgattgatatgggagtatcacttgacacagaagtttacatgtgcatggttgagggttattttaatcatggtgattccatgaaagccgaggaatttattaccaaaatgaagaacagggatattcatcataagccatggaaaggtaatcga

SEQ ID NO: 2405 - DNA, 1452 bp, Triticum aestivum
  source 1..1452: mol_type = genomic DNA
atgtcgcgcctccagccccgctctttctccagtcccgtctcctcacgagtcagcgagctgctggatgaattcaaatatcatctgggctctgggacgctctggccggagctcgcgcaccaactattcgacgaaatgctgcgccaacccgtcccggtttcagcacgcgcactcggcggcttattttctgccctcgcgcgtgcgcggccctcaaccgcctgtactgatggccccgccctcgccatcgatctcttcaaccgccaccggatagcacctgacatttacacctacaacatactaattaactgctgccaccgagcatgccgcccagacctagggcctgccttcttcggatgccttctcaagacaggcatcacgacggacgtcattacctacagcagtttattgcagtgcttctgtgacatgaagcggacagaggaagctctggacctgctgctccatagggtgagtgataacctgcctgatgccatctcctactcagttattctcaagagcttctgcgacaacggaaggagccagtgtgcgcttgacctgctccagatgatggccaaaaaaggtgctgaccattcccccaacgtggtctcatacaacttggtaatcaatggtttctttaaggagggtgaaataagcaaagcatgtgatctgttccatgaaatgatacaacaagggtttgttcccgatgtggtgacgtataactctgttattaatgcactgtgcaaagcaagagcaatggacaaggcagaggtggtccttcgatcgatggttcataatagtgtccaaccggatgttgtaacatataatagcttgatccaaggatttttaactacgggtcagctgaaagaagcctttaggttgttgaaagtgatgagaagccaaggtgttatgccaagcgttgttacttgcacctcagtcatggactacctttgcaagcatggaagaatcaaagaagctgaggaaacattttattccatggccgtgagtggccgaaaaccagatacagtctcatactctattatgctccttgggtacgctatagaaggatcccttgttaaaatgattgatctctgtgagatgatggcaagagatggagttgtacccgacctccgttgtttcaacatactgattaaggcatatgctaagtatggcaggatggatgtggccatgcttttctttgaagacatgttgaagcagggtgtgaagcctaatggattcacttatttaattgtgatatctgcattttgcaagatgggcaggatggatgatgcgatggaaaaattcaatgagatgattgatatgggagtaccacttgacacagaagtttacatgtgcatggttgagggttattttaatcatggtgattccatgaaagccgaggaatttattaccaaaatgaagaacagggatattcatcataagccatggaaaggtaatcga

SEQ ID NO: 2406 - DNA, 1452 bp, Triticum aestivum
  source 1..1452: mol_type = genomic DNA
atgtcgcgcctccagccccgctctttctccagccccgtctcctcacgagtcagcgagctgctggatgaattcaaatatcatctgggctctgggacgctctggccggagctcgcgcaccaactgttcgacgaaatgctgcgccaacccgtcccggtttcagcacgcgcactcggcggcttattttctgccctcgcgcgtgcgcggccctcaaccgcctgtactgatggccccgccctcgccatcgatctcttcaaccgccaccggatagcacctgacatttacacctacaacatactaattaactgctgccaccgagcatgccgcccagacctagggcctgccttcttcggatgccttctcaagacaggcatcacgacggacgtcattacctacagcagtttattgcagtgcttctgtgacatgaagcggacagaggaagctctggacctgctgctccatagggtgagtgataacctgcctgatgccatctcctactcagttattctcaagagcttctgcgacaacggaaggagccagtgtgcgcttgacctgctccagatgatggccaaaaaaggtgctgaccattcccccaacgtggtctcatacaacttggtaatcaatggtttctttaaggagggtgaaataagcaaagcatgtgatctgttccatgaaatgatacaacaagggtttgttcccgatgtggtgacgtataactctgttattaatgcactgtgcaaagcaagagcaatggacaaggcagaggtggtccttcgatcgatggttcataatagtgtccaaccggatgttgtaacatataatagcttgatccaaggatttttaactacgggtcagctgaaagaagcctttaggttgttgaaagtgatgagaagccaaggtgttatgccaagcgttgttacttgcacctcagtcatggactacctttgcaagcatggaagaatcaaagaagctgaggaaacattttattccatggccgtgagtggccgaaaaccagatacagtctcatactctattatgctccttgggtacgctatagaaggatcccttgttaaaatgattgatctctgtgagatgatggcaagagatggagttgtacccgacctccgttgtttcaacatactgattaaggcatatgctaagtatggcaggatggatgtggccatgcttttctttgaagacatgttgaagcagggtgtgaagcctaatggattcacttatttaattgtgatatctgcattttgcaagatgggcaggatggatgatgcgatggaaaaattcaatgagatgattgatatgggagtaccacttgacacagaagtttacatgtgcatggttgagggttattttaatcatggtgattccatgaaagccgaggaatttattactaaaatgaagaacagggatattcatcataagccatggaaaggtaatcga

SEQ ID NO: 2407 - DNA, 1452 bp, Triticum aestivum
  source 1..1452: mol_type = genomic DNA
atgtcgcgcctccagccccgctctttctccagccccgtctcctcacgagtcagcgagctgctggatgaattcaaatatcatctgggctctgggacgctctggccggagctcgcgcaccaactgttcgacgaaatgctgcgccaacccgtcccggtttcagcacgcgcactcggcggcttattttctgccctcgcgcgtgcgcggccctcaaccgcctgtactgatggccccgccctcgccatcgatctcttcaaccgccaccggatagcacctgacatttacacctacaacatactaattaactgctgccaccgagcatgccgcccagacctagggcctgccttcttcggatgccttctcaagacaggcatcacgacggacgtcattacctacagcagtttattgcagtgcttctgtgacatgaagcggacagaggaagctctggacctgctgctccatagggtgagtgataacctgcctgatgccatctcctactcagttattctcaagagcttctgcgacaacggaaggagccagtgtgcgcttgacctgctccagatgatggccaaaaaaggtgctgaccattcccccaacgtggtctcatacaacttggtaatcaatggtttctttaaggagggtgaaataagcaaagcatgtgatctgttccatgaaatgatacaacaagggtttgttcccgatgtggtgacgtataactctgttattaatgcaccgtgcaaagcaagagcaatggacaaggcagaggtggtccttcgatcgatggttcataatagtgtccaaccggatgttgtaacatataatagcttgatccaaggatttttaactacgggtcagctgaaagaagcctttaggttgttgaaagtgatgagaagccaaggtgttatgccaagcgttgttacttgcacctcagtcatggactacctttgcaagcatggaagaatcaaagaagctgaggaaacattttattccatggccgtgagtggccgaaaaccagatacagtctcatactctattatgctccttgggtacgctatagaaggatcccttgttaaaatgattgatctctgtgagatgatggcaagagatggagttgtacccgacctccgttgtttcaacatactgattaaggcatatgctaagtatggcaggatggatgtggccatgcttttctttgaagacatgttgaagcagggtgtgaagcctaatggattcacttatttaattgtgatatctgcattttgcaagatgggcaggatggatgatgcgatggaaaaattcaatgagatgattgatatgggagtaccacttgacacagaagtttacatgtgcatggttgagggttattttaatcatggtgattccatgaaagccgaggaatttattactaaaatgaagaacagggatattcatcataagccatggaaaggtaatcga

SEQ ID NO: 2408 - DNA, 1452 bp, Triticum aestivum; identical to SEQ ID NO: 2406
  source 1..1452: mol_type = genomic DNA

SEQ ID NO: 2409 - DNA, 1452 bp, Triticum aestivum; identical to SEQ ID NO: 2405
  source 1..1452: mol_type = genomic DNA

SEQ ID NO: 2410 - DNA, 1452 bp, Triticum aestivum; identical to SEQ ID NO: 2406
  source 1..1452: mol_type = genomic DNA

SEQ ID NO: 2411 - DNA, 894 bp, Triticum aestivum
  source 1..894: mol_type = genomic DNA
atgagccgccgctttccccctggagctatgagcagacgcatcttggagcggaaaattcaagaccggtaccgtgccggacacattggcactgacgacgcactcaacctgttcgacgaattgatccaggttgctgggccttcctcggtccgcgccatcaactgcctcctcaccgttgtcggccgtgattgccccgcgctcggcgtctccctcttcaaccgtgttgcaagagccaaggtgcctccacacaatatcacctatggcattctagtcgactgctgctgccgtgctggccgcttggaccttggacacgctgccatgggacacgtcatcaagttgggatttacagcagaagctattgtcaatttcagccacctactcaaggccatctgtgcagagaagaagaccagttatgcaatggacattgtactccggataatgcccgagtttaactgtgttccgaacattttctcctataacattcttttcaagggtctctgcaatgagaggagaagccaagaggctgttgagctgattaacattatggttgaggatggacgaggttgctgccgacctgatgtggtgacctataacactgtaatcgatggcttgttgaaagagggtgaggtaggcaaggcttacagcctattttgtgaaatgccacagaggggaatttcgccggatgatgtgacctggaactcaatcatctctggcatgtgcaaggttcatgcgatggacaaggctgaggatgttcttgaacagatgcttgatagaggaattctgccagatgttaccacatataatagtctgatacatggatattattcactaggacagtgcgaagaggtggaccggatttcaaggaaatgtctagaaatggtgttcaaccagatattg

SEQ ID NO: 2412 - DNA, 1425 bp, Triticum aestivum
  source 1..1425: mol_type = genomic DNA
atggccgtctgtgcggagaagaagaccagctatggaatggacatcgtgctccgaattatgcctgagcttaactgcataccggatgtttactcctacagcattcttttcaagggtctctgcaacgagaagagaagccaagaggctctcgagctgattcacatgatggttgagcatggaggtagctgccaacctaatctggtctcatacaacaccgtaattgacggcttgttgaaagagggtgaggtgggcaaggcttacagcctattttgtgaaatggtacagagagggatttcgccaaatattgtgacctacaactcaatcatctctggcatgtgcaaggttcatgcaacggacaaggctgagaaggttcttcaacagatgtttgatagagaatttctgcctgatactgccacatatactagcctaatacatggatattattcatcaggacaatgcaaagaggtggaacaggttttcgagcacatgtctataaatggtgttcaaccaaatatgataacttacaatatacagatggattatcattgcaagagcggaagatgcacggaagctaggaagatctttgattctatggtcagtttgggccaaaaaccgtctgtttctacctacagtattctgcttcatggttatgctattgaaaaatcatttcatgatatgcattgtctccttgatttgatggtagaaaatggtatctcaccagatcatcatgtctacaacatactcatatctgcatatgctaaagaggaaatggcaagtgaggtaatgcatatatttacaaaaatgcggcagcaaggattgaaccctagtgttgcgaactatggagcggtaataaacttgctttccagtattggcagaatggatgatgctatgtcccaattcaatcaaatgatagccgaaggattagctcctgatatcatagttttcaacccccttattagtggtttttgtacttgtggcaaatgggagaaggttcatgaactattttctgaaatgttgaatcgcggcatctatcctgataccgtgttcttcaccacaattatggaccgcctttgcaaaaatggaagggttatggaagcccaagatatgtttgacctgatggtacacatgggtgttaagcctaatgttcatgcttatgccacattgatgcatgggtactttttcgttaggaagatggatgaagtgaggaagttacttggcaatatgctctcaattggcttgaaaccggatgttttcatctataccatattgattgatggttactctaagaatggaatgatagataacgcatcagctgttttcactgagatgttggaaaagaatattaagccttctgccatcacttatagcacaatgctctatggcctatttcatgctggactgttgctgccattgaactatatctcagga

SEQ ID NO: 2413 - DNA, 1071 bp, Triticum aestivum
  source 1..1071: mol_type = genomic DNA
atggactgcagctgccgcgcacaccgcctcgatctggcgtttgccttcttcggccgtctcctcaggacgggactgaaggcaggcgtcatagaagtcaacagtctcctcaaaggactctgccacgcaaagcgggcggatgaggccatggaagtgcttcttcacaggatgcctgagctgtttataggagtacagggcacagctgtttatcgttccctaatccagggattttgtacacacggcgatttggtgaaagcaaaggaatatgttactgaaatgatgaagaaaggtatgcctcctcctgatattatgttcttcagttcaatcatgcagaacctatgcacagaaggaagggtaatagaagcacgagatatccttgacttgatagtgcgcattggtatgaggcctgatgttttcatatttaatatactgatcggtggatactgcctagtcggcaagatggaggatgcctcaaaaatatttgatgatatggtgtcatatggtttagaaccttgtaactttacgtatggtatacttattaatggctattgcaaaaataaaaggattgatgacgggcttattctgttcaaagagatgctgcgcaagggacttaaacctacaacttttaattataacgtcatactggatggattatttctggctggacaaactgttgctgcaaaagagaagtttgatgagatggttgaatctggagtaagtgtgtgcattgatacatactctatagttcttggtggactttgtagaaatagctgcagtagcgaagcgatcaccctgttccgaaaattaagcgcaatgaatgtgaaatttaatattacaattgtcaataccattattggtgccttctacagggtcgagagaaaccaagaggctaaggatttgtttgctgctattccagccagtggcttggttcctaatgttcttacctacaccataatgattaaaaatcttataaaagaaggttcagtggaagaagctaacaatctttttttatcgatggagaagagcggctgtagtgccaactcttatctgttaaatcatatcatcagaaggtgt

SEQ ID NO: 2414 - DNA, 1338 bp, Triticum aestivum
  source 1..1338: mol_type = genomic DNA
atgctgcgccaacctgtcccaatatcagcgcgtgcactcaacggcttatttgttgcactcgcgcgtgcgccgccctcaaccgcctgcaccaatgcctctgccctcgccatcgatctcttcaaccgcatggcccaagcaggtcgtcgccaggtgacagcgcccaccatttacacctacaatatactaattgactgctgccatcgagcatgctgcccggacctagggcctgccttcttcggccgccgcctcaagacaggcataccgacggacatcattacctacagcaacttattcaagtgcctctgcgacatgaagcgcacggaggaggctttgggcgtgctgctccacaggatgcccgatgacctgcctgatgtcatctcctactcagtaattctcaagagtttatgtgacaatggtaggtgccagctcgcgcttgacctgctccggatgattgccgaaaaaggatctgaccactcccccagcgtggtgtcatacagcatggtaatcgatggtttcttcaaggagggtgaaataagcaaagcatgtgatctgttccatgaaatgatgcagcagggggttgtgcccgatgtggtgacgtatagctctgttatcgatgctctgtgcaaagcaagagcaatggacaaggcagaggtggttcttcgatcaatggttcataatggtgtccaaccagatgctgtgacatataattgcctgatccaaggatattcgactttgggacagttgaaagaagtcgctaggttgttgaaagtgatgagaagccaaggtgttatgccaagcgttgttacctacacctcactcatggactacctttgcaagcatggaagaatcaaagaagctgaggaaatattttattccatggctgtgaatggacgaaaaccagatatagtctcatactctattatgctccgtgggtacgctatagaaggatccctcattgatatgatccatctctgtgagctgatggcaagaaatggagttgtacccgacctctattgtttcaacatactgattaatgcatgtgctaagcatggaatgatggatgtggccctgcttttcttcgaagatatgttgaagcagggggtgaagcctaatgaattcacttatttaactgtgatatctgcattttgcaagatgggcaggatggatgatgcgatggaaaaattccgtgagatgattgatatgggagtaccagttgacacagaagtttacatgtgcatggttgagggttattttaaaaatggtgattcagtgaaagccaaggattttattaccaaaatgaagaacaaggatatttcaaataggccgcagaagggtaat

SEQ ID NO: 2415 - DNA, 1338 bp, Triticum aestivum; identical to SEQ ID NO: 2414
  source 1..1338: mol_type = genomic DNA

SEQ ID NO: 2416 - DNA, 1338 bp, Triticum aestivum; identical to SEQ ID NO: 2414
  source 1..1338: mol_type = genomic DNA

SEQ ID NO: 2417 - DNA, 1338 bp, Triticum aestivum; identical to SEQ ID NO: 2414
  source 1..1338: mol_type = genomic DNA

SEQ ID NO: 2418 - DNA, 1338 bp, Triticum aestivum; identical to SEQ ID NO: 2414
  source 1..1338: mol_type = genomic DNA

SEQ ID NO: 2419 - DNA, 1338 bp, Triticum aestivum; identical to SEQ ID NO: 2414
  source 1..1338: mol_type = genomic DNA

SEQ ID NO: 2420 - DNA, 1431 bp, Triticum aestivum
  source 1..1431: mol_type = genomic DNA
atgtcacgcctccagccccgctcctcacgcgccaacgagctgctagacgaattcaaatatcatctgggctccgggacgctctggccggagctcgcgcaccaactgttcgacgaattgctgcgccaacccgtcccggtttcagcgcgcgcactcaacggcttgtttgctgccctcgcggatgcgccgccctcggccaactgcgcagatggccctgccctagccatcaatctcttcaaccgccaccggatatcacctaacatttacacctacaacatactaattgagtgctgccacagagcatgccgcccagacctagggcctgccttcttcggccgcctcctcaaggcaggcatcacaatgagcgtcattacctacaacagcttattcaagtgcctctgtgacatgaagcgcacggaggaggcttccgacgtgctgctccacaggatgcctgacgacctgcctgatgtcatctcctactcagtaattctcaagagtttctgcgacagtgggaggagccagcgtgcgcttgacctgctccgggtgatggccaaaaaaggtggtgactactctcccaacgtgatttcatacaacatggtaatggatggcttttttaaggagggtgaagtaagcaaagcacgtgttctattccacgaaatgatacaacagggggttgtgcctactgaggtgacatatagctccataatcaatgcgctatgcaaagcaagagcaatggataaggcggaggtgatccttcgacatatggttcgtagtggtgtccaaccacatgataggatatataataccctgatccatggatttttaacttcaggtcagctgaaagaagcctttaggctgttgaaactgatgacaagccaaggtgttatgccaagcgttgttacctacaactcactcatgacctacctttgcaagaatggaagattcaaggaagctgtagaacttttttattcaatggctgtgaagggccaaaaacctagtgtcgtctcatactctataatactccatgggtacgctatagaaggatcccttgttaaaatgattgatctctgtgagctgatggcaagagacggagttgtacctaacctccattgtttcaacatactgattaatgcgtatgctaagtatggcatgatggacgtggccatgcttttcttcgaagacatgttgaagcagggtgtgaagcctaatgaattcacttatttaactgtgatatctgcgttttgcaagatgggcaggatggatgatgcgatggaaaaattcagtgagatgattaatatgggagtaccacttgacacagaagtttacatgtgcatggttgagggttatttgaatcttggcaattccatgaaagccaaggaatttattaccaaaatgaagaacagggatattcatcataggccacggaaaggtaat

SEQ ID NO: 2421 - DNA, 1431 bp, Triticum aestivum; identical to SEQ ID NO: 2420
  source 1..1431: mol_type = genomic DNA

SEQ ID NO: 2422 - DNA, 1431 bp, Triticum aestivum; identical to SEQ ID NO: 2420
  source 1..1431: mol_type = genomic DNA

SEQ ID NO: 2423 - DNA, 1431 bp, Triticum aestivum; identical to SEQ ID NO: 2420
  source 1..1431: mol_type = genomic DNA

SEQ ID NO: 2424 - DNA, 1431 bp, Triticum aestivum; identical to SEQ ID NO: 2420
  source 1..1431: mol_type = genomic DNA

SEQ ID NO: 2425 - DNA, 1431 bp, Triticum aestivum; identical to SEQ ID NO: 2420
  source 1..1431: mol_type = genomic DNA

SEQ ID NO: 2426 - DNA, 1212 bp, Triticum aestivum
  source 1..1212: mol_type = genomic DNA
atggccagagcaggccgccactggatgacagcacccaccattcacacctacaacatactaattgactgctgccaccgagcatgccgcccagacctagggcctgccttcttcagccgcctcctcaagacaggcatcacaatgagcgtcattacctacagcagcttattcaagtgcctctgtgacatgaagcgcacggaggaggctttgggcgtgctgctccacaggatgcccgacgacctgcctgatgtcatctcctactcagtaattctcaagagcttctgcgacagtggtaggagccagcttgcgcttgatctgctccgaatgatggccgaaaaaggatctgaccactcccccagcgtggtgtcatacagtgtggtaatcgatggtttcttcaaggagggtgaaataagcaaagcatgtgatctgttccatgaaatgatgcagcagggggttgtgcccgatgtggtgatgtatacctccattatcaatgcgctatgcaaggcaagagcaatggacaaggcagaggtggttcttcgatcaatggttcataatggtgcccaaccagatgctgtgacatataatagcctgatccaaggatattcaactttgggccagttgaaagatgtcgttaggttgttgaaagtaatgagaagccaaggtgttatgccaagcgttgttacctacacctcactcatggactgcctttgcaagcatggaagaatcaaagaagctgaggaaatattttattccatggctgtgaatggacaaaaaccagatatagtctcatactctattatgctccgtgggtatgctatagaaggatccctcgttgatatgatcgatctctgtgagctgatggcaagaaatggagttgtacccgacctccagtttttcaacatagtgattaatgcatatgctaagcatggaatgatggatgtggccctgcttttcttcgaagatatgttgaagcagggggtgaagcctaatgaattcacttatttaactgtgatatctgcattttgcaagatgggcaggatggatgatgcggtggaaaaattccgtgagatgattgatatgggagtaccagttgacacagaagtttacatgtgcatggttgagggttattttaaaaatggtgattcagtgaaagccaaggattttattaccaaaatgaagaacaaggatattccaaataggccgcagaagggtaat

SEQ ID NO: 2427 - DNA, 1368 bp, Triticum aestivum
  source 1..1368: mol_type = genomic DNA
atgtgcaaggttcaagcaatggatgaggccgaggaggtccttcaacagatgtttgatacaggtattctgccaaatattactacatataatagtctgatacacggatattattcatcaggacagtgcgaacaggtggctcatattttcaagaaaatgtctaggaatggtgttcagccagatattgcaacttacaccatacagatggattatctttgcaagagtagaagatttgcgggagctagaactatttttgattctatggccggtaaggaccaaaaaccgaatgttactagctacagtattctgcttcatgcatatgctatggaacagtcagtccatgatatgcattgtctcattgaattgatggtagaaaatggtattgcaccaaatcattctgtgtacaacatactgatagttgcatatgctaaggggaaaatgtttgatgaggtaatgcatatatttacaaaaatgcggcagcaaggattgaacccaaatgctgcgagctatggaacagtaataaacttactttgcagtattggccgaatggatgatgctatgttgcaattcaatcaaatgataactgaagaattagctcctgatatcatagttttcaacactcttataagtggtttttgttcttgtggaaaatgggagaaggttcatgaactacttgctgaaatgttgaatcgtggcatctatcccgacaacgtgttcttcaacacaattatggatcacctttgcaaaaatggaagggttatggaatcccaagatctcgctgacctgatgatacacatgggtttgaagcctgacatgcatacttataacacactgatgggtggatactttttcattggtaagatggatgaagtgaggaagttacttgaccatatggtctcaattggcatggaaccagatgttgtcacctataacacactgattgatggttactttaagaatggaatgatagatgatgcgttagctattttcagtgaaatgctggacaaaaaagttaagccttgtgttatcacttataacacagtgttgcatgggttatttcatactggaaggactgttgctgcaaatgaactctatctcaggatgattgacagcggaatatgtgtggatattgtgacctacaacataattctcagtggtttgtgtagaaataactgtgtggatgaagcactaagaatgtttcaaaacctgtgttcaacaaattatcaacttgagatcaggacttataatattatgattagtgcgttgcttaaagttggcaggaaggaagaagccacaggtttgttggatggaatctcggccaaaggatttgtgctcgatgctgttacgtatagattaatgatacaaagcttt

SEQ ID NO: 2428 - DNA, 825 bp, Triticum aestivum
  source 1..825: mol_type = genomic DNA
atggatgatgctatgttgcaattcaatcaaatgataactgaagaattagctcctgatatcatagttttcaacactcttataagtggtttttgttcttgtggaaaatgggagaaggttcatgaactacttgctgaaatgttgaatcgtggcatctatcccgacaacgtgttcttcaacacaattatggatcacctttgcaaaaatggaagggttatggaatcccaagatctcgctgacctgatgatacacatgggtttgaagcctgacgtgcatacttataacacactgatgggtggatactttttcattggtaagatggatgaagtgaggaagttacttgaccatatggtctcaattggcatggaactggatgttgtcacctataacacactgattgatggttactttaagaatggaatgatagatgatgcgttagctgttttcagtgaaatgttggacaagaaagttaagccttgcgctatcacttataacacagtgctgcatgggttatttcatactggaaggactgttgctgcaaatgaactctatctcaggatgattgacagcggaatatgtgtggatattgtgacctacaacattattctcagtggtctgtgtagaaataactgtgtggatgaagcactaagaatgtttcaaaacctgtgttcaacaaattatcaacttgagaccaggacttataatattatgattagtgcgttgcttaaagttggcaggaaggaagaagccacaggtttgttggatggaatctcggccaaaggatttgtgcccgatgctgttacgtatagattaatgatacaaagcttt

SEQ ID NO: 2429 - DNA, 825 bp, Triticum aestivum; identical to SEQ ID NO: 2428
  source 1..825: mol_type = genomic DNA

SEQ ID NO: 2430 - DNA, 915 bp, Triticum aestivum
  source 1..915: mol_type = genomic DNA
atgtttgatacaggtattctgccaaatattactacatataatagtctgatacacggatattattcatcaggacagtgcgaagaggtggctcatattttcaagaaaatgtctaggaatggtgttcagccagatattgcaacttacaccatacagatggattatctttccaagagtagaagatttgcggaagctagaactatttttgattctatggccggtaaggaccaaaaaccgaatgttactagctacagtattctgcttcatgcgtatgctatggaacagtcagtccatgatatgcattgtctcattgaattgatggtagaaaatggtattgcaccaaatcattctgtgtacaacatattgatagttgcatatgctaaggggaaaatgtttgatgaggtaatgcatatatttacaaaaatgcggcagcaaggattgaacccaaatgctgcgagctatggaacagtaataaacttactttgcagtattggccgaatggatgatgctatgttgcaattcaatcaaatgataactgaagaattagctcctgatatcatagttttcaacactcttataagtggtttttgttcttgtggaaaatgggagaaggttcatgaactacttgctgaaatgttgaatcgtggcatctatcccgacaacgtgttcttcaacacaattatggatcacctttgcaaaaatggaagggttatggaatcccaagatctcgctgacctgatgatacacatgggtttgaagcctgacatgcatacttataacacactgatgggtggatactttttcattggtaagatggatgaagtgaggaagttacttgaccatatggtctcaattggcatggaaccagatgttgtcacctataacacactgattgatggttactttaagaatggaatg

SEQ ID NO: 2431 - DNA, 825 bp, Triticum aestivum; identical to SEQ ID NO: 2428
  source 1..825: mol_type = genomic DNA

SEQ ID NO: 2432 - DNA, 1368 bp, Triticum aestivum; identical to SEQ ID NO: 2427
  source 1..1368: mol_type = genomic DNA

SEQ ID NO: 2433 - DNA, 825 bp, Triticum aestivum; identical to SEQ ID NO: 2428
  source 1..825: mol_type = genomic DNA

SEQ ID NO: 2434 - DNA, 690 bp, Triticum aestivum
  source 1..690: mol_type = genomic DNA
atgttgaatcgtggcatctatcccgacaacgtgttcttcaacacaattatggatcacctttgcaaaaatggaagggttatggaatcccaagatctcgctgacctgatgatacacatgggtttgaagcctgacatgcatacttataacacactgatgggtggatactttttcattggtaagatggatgaagtgaggaagttacttgaccatatggtctcaattggcatggaaccagatgttgtcacctataacacactgattgatggttactttaagaatggaatgatagatgatgcgttagctattttcagtgaaatgctggacaaaaaagttaagccttgtgttatcacttataacacagtgttgcatgggttatttcatactggaaggactgttgctgcaaatgaactctatctcaggatgattgacagcggaatatgtgtggatattgtgacctacaacataattctcagtggtttgtgtagaaataactgtgtggatgaagcactaagaatgtttcaaaacctgtgttcaacaaattatcaacttgagatcaggacttataatattatgattagtgcgttgcttaaagttggcaggaaggaagaagccacaggtttgttggatggaatctcggccaaaggatttgtgctcgatgctgttacgtatagattaatgatacaaagcttt

SEQ ID NO: 2435 - DNA, 1368 bp, Triticum aestivum; identical to SEQ ID NO: 2427
  source 1..1368: mol_type = genomic DNA

SEQ ID NO: 2436 - DNA, 1368 bp, Triticum aestivum; identical to SEQ ID NO: 2427
  source 1..1368: mol_type = genomic DNA

SEQ ID NO: 2437 - DNA, 825 bp, Triticum aestivum; identical to SEQ ID NO: 2428
  source 1..825: mol_type = genomic DNA

SEQ ID NO: 2438 - DNA, 1368 bp, Triticum aestivum; identical to SEQ ID NO: 2427
  source 1..1368: mol_type = genomic DNA

SEQ ID NO: 2439 - DNA, 612 bp, Triticum aestivum
  source 1..612: mol_type = genomic DNA
atgtgcaaggttcaagcaatggataaggccgaggaggtccttcaacagatgtttgatacaggtattctgccaaatattactacatataatagtctgatacacggatattattcatcaggacagtgcgaagaggtggctcatattttcaagaaaatgtctaggaatggtgttcagccagatattgcaacttacaccatacagatggattatctttccaagagtagaagatttgcggaagctagaactatttttgattctatggccggtaaggaccaaaaaccgaatgttactagctacagtattctgcttcatgcgtatgctatggaacagtcagtccatgatatgcattgtctcattgaattgatggtagaaaatggtattgcaccaaatcattctgtgtacaacatattgatagttgcatatgctaaggggaaaatgtttgatgaggtaatgcatatatttacaaaaatgcggcagcaaggattgaacccaaatgctgcgagctatggaacagtaataaacttactttgcagtattggccgaatggatgatgctatgttgcaattcaatcaaatgataactgaagaattagctcctgattcagcctcattt

SEQ ID NO: 2440 - DNA, 825 bp, Triticum aestivum; identical to SEQ ID NO: 2428
  source 1..825: mol_type = genomic DNA

SEQ ID NO: 2441 - DNA, 1077 bp, Triticum aestivum
  source 1..1077: mol_type = genomic DNA
atgccaaccgcccgcctgtcctccctctccacctcctccttcaaggctccttcacgagagcgccgagcccccctcgccgccttggctgccgccacggagcgcgtccgcgagggaacgctaagtcggcaggacgcgcaccacctgttcgacgaattgctaggccaagccgccgccgtcccggaacgcgggctgaacaactttcttgccgcactagcccgtgctccgccctcatctgcctgcagcgatggccccggccttgccattgccctcttcaaccgcatgtcccaaggcgctggtgcacgggtggtgtcgcccacgctctgtacctattccatcctcatggactgctgctgccgcgcaggccgcccggacttggtggttgccttcttcggtcgcctcatcaggttggggttgcgcttggaggtcatctccttcagcaatctcctcaaggggctttgcaaggccaagcgctcaaatgaggcattggatctgctgctccaccggatgcctgaactggactgtgcgcctgatgtcttctcctacagcattgtaatcaacggctgctttaaagaaggtgaagtagacaaagcgtgcaatctcttccatgagatgatccaactgggagttcaacctaatgtggccatctacacctcaattatcgatgcactaagcaagtgcggagccatggacaaggcagaagtggtccttcggcaaatggttgatcaaggcattggacccaacatcaggacatatactagcctgatacatggatattccgcttcgggtcagtggaaggaggcagttaggttattcaagaaaatgataaggcttggtgctctaccagataccgtcatgtggaactcatttatggattcactttgcaagcatagaaggacaaaggatgctagagatatttttgactccatggctgcaaagggccaaaaacctgatattttctcctattctactatgcttaacgggtatgcgaaagaaggatgcttcgatgatatgacttgtctcttcaattcgatgctacagaatggtattctacctgatcaccgtgttttcaacattgat

SEQ ID NO: 2442 - DNA, 1077 bp, Triticum aestivum; identical to SEQ ID NO: 2441
  source 1..1077: mol_type = genomic DNA

SEQ ID NO: 2443 - DNA, 1077 bp, Triticum aestivum; identical to SEQ ID NO: 2441
  source 1..1077: mol_type = genomic DNA

SEQ ID NO: 2444 - DNA, 1077 bp, Triticum aestivum; identical to SEQ ID NO: 2441
  source 1..1077: mol_type = genomic DNA

SEQ ID NO: 2445 - DNA, 1077 bp, Triticum aestivum; identical to SEQ ID NO: 2441
  source 1..1077: mol_type = genomic DNA

SEQ ID NO: 2446 - DNA, 1077 bp, Triticum aestivum; identical to SEQ ID NO: 2441
  source 1..1077: mol_type = genomic DNA

SEQ ID NO: 2447 - DNA, 1341 bp, Triticum aestivum
  source 1..1341: mol_type = genomic DNA
atgctgcgccaacctgtcacagtatcagtacgtgcactcaacggcttatttgctgctcttgcgcgtgcgccgccctccaccatctgcaccgatgcccttgccctcgccattgatctcttcaaccgcatggcccaagcaggccgtcgccaggtgccagcacccaccattatcacctacaacatactgattggctgctgccaccgagcatgccgcccggacctagggcctgccttcttcggccgcctgctcaaggcaggcatcaagacggatgtcattacctacagcagcttgttcaagtgcctctgtgacatgaagcgcacagaggaggctctgaacatgctgttccataagatgcccgaagacctgcctaatgtcatctcatactcagtgattctcaagagcttctgcgacaatgggaggagccagcttgcgcttgatctgctccagatgatggccaaaaaaggcgctgaccactcccccgacgtgatgtcatacaacatggtaattgatggcttctttaaggagggtgaagtaagcaaagcatgcgatctattccaagaaatgatacgacaggggattgtgcctactgaggtgacatatagctccattatcaatgcgctatgcaaagcaagagcaatggacaaggcagaggtggttcttcgatcaatggttcataatggtgcccaaccagatgctgtgacatataatagcttgatccaaggatattcaactttgggacagttgaaagaagtcgctaggttgttgaaagtgacgagaagccaaggtgttatgccaagcgttgttacctacaactcactcatggactacctttgcaagcatggaagaatcaaagaagctgaggaaatattttattccatggccgtgaatggccgaagaccagatatagtctcatactctattatgctccatgggtacgctatagaaggatcccttgttaaaatgattgatctctgtgagctgatggcaagagatggagttgtacccgacctccgttgtttcaacatactgattaatgcatatgctaagtatggtaggatggatgtggccatgcttttctttgaagacatgttgaagcagggtgtgaagcctaatgaattcacttatttaactgtgatatctgcattttgcaagatgggcaggatggatgatgcgatggaaaaattcagtgagatgattgatatcggagtaccacttgacacagaagtttacatgtgcatggttgagggttattttaatcatggtgattccatgaaagccgaggaatttattaccagaatgaagaacagggatattaatcataagccgtgggaaggtaatcga

SEQ ID NO: 2448 - DNA, 723 bp, Triticum aestivum
  source 1..723: mol_type = genomic DNA
atggatcgcctttgcaaaaatggaagggttacggaagcccaggatctctttgacctgatggtacacatgggtgtgaagcctgacgtgtgtacttataacacactgatgggtggatacttgttcgttggtaagatggatgaagtgagcaagttacttgacaatatggtctcaattggcatggaaccagatgttatcacatatagcatactgattgatggttactctaagaatggaaggatagatgatgcattggttgttttcagggaaatgttggacacgaagggtaagccgtctgttatcagttttaatattatgattggtgcattgcttaaatgtggtaggaaggaagaagccaaagatttgtttgatggtatctgggccaatgggttagtgcctgacgttattacatatagcttaatgatacaaaaacttattgaagaaggttctctacaagagtctgatgatctattcctttctacggagaagaatggatgtgctgccgactcccgtaggctaaatgctatagttagaagcttacttcagaaaggggagattcctagggctgggacttatctgtctaaaattgatgagaggggcttcacccttgaagcttccacagctagcttgttgactgcacttgcttcagggggaaaaggccaggaatacaaggagttactccctgaaaaataccactcttttctggaacagggcactttgaacttc

SEQ ID NO: 2449 - DNA, 723 bp, Triticum aestivum; identical to SEQ ID NO: 2448
  source 1..723: mol_type = genomic DNA

SEQ ID NO: 2450 - DNA, 1362 bp, Triticum aestivum
  source 1..1362: mol_type = genomic DNA
atggagcaagcccatccccctaactctgctctcgttatttcctatcccaggctgcgccgatccggtctggtaggtggtgagcggtggcgacgcattataacttacaatatacagatggattatctttgcaagagcggtcaatgtgcagaagctaggaagatttttgattctatgatcagtctgggccaaaacccgactgctactacctacagtattctgcttcatgggtatgctatggaaaaatcttttcatgatatgcattgtcttattgatttgatggtagaaaatggcatttcacctgatcattatgtctacaacatactcatatctgcatacgctaaagaagaaatggttggtgaggtaatgcatatatttacaaaaatgcggcagcaaggattgaaccctgatgcagtgagctacggaacagtaatagacttactttccaggattggccgaatggatgatgctatgtccctattcaatcaaatgataactgaaggattagctcctggtaccatagttttcaaccaccttattagtggtttttgtacttgtggcaaatgggagaaggttcatgaactattttctgaaatgttggatcgcggcatctgtccagacacagtgttcttcaacacagttatggatcgcctttgcaaaaatggaagggttacggaagcccaggatctctttgacctgatggtacacatgggtgtgaagcctgacgtgtgtacttataacacactgatgggtggatacttgttcgttggtaagatggatgaagtgagcaagttacttgacaatatggtctcaattggcatggaaccagatgttatcacatatagcatactgattgatggttactctaagaatggaaggatagatgatgcattggttgttttcagggaaatgttggacacgaagggtaagccgtctgttatcagttttaatattatgattggtgcattgcttaaatgtggtaggaaggaagaagccaaagatttgtttgatggtatctgggccaatgggttagtgcctgacgttattacatatagcttaatgatacaaaaacttattgaagaaggttctctacaagagtctgatgatctattcctttctacggagaagaatggatgtgctgccgactcccgtaggctaaatgctatagttagaagcttacttcagaaaggggagattcctagggctgggacttatctgtctaaaattgatgagaggggcttcacccttgaagcttccacagctagcttgttgactgcacttgcttcagggggaaaaggccaggaatacaaggagttactccctgaaaaataccactcttttctggaacagggcactttgaacttc

SEQ ID NO: 2451 - DNA, 723 bp, Triticum aestivum; identical to SEQ ID NO: 2448
  source 1..723: mol_type = genomic DNA

SEQ ID NO: 2452 - DNA, 1371 bp, Triticum aestivum
  source 1..1371: mol_type = genomic DNA
atgtcaaacattggcatgccaatttttggcagcaaaccaattatgctccatgttccgcatgcgcctccgcaactcctccaccatgcccatgtcccgcatcggcctcctccgccgccgcctctcctcctcctcctcctcctacttctccacctccacctcgccaccctcacggtcacggtcatggtctccccgcgacgcctttgccgcggccacggagcgcgtccgcgccgggacgctcagcccggaggacgcacaccacctgttcgaccaattgctacggcaggacactccggtccacgagcgctccctgggcggcttccttgccgccctcgcccgtgcgccagactcagctgcctgcagagatggccccgccctcgccatcgccctcttcaaccgcgtatgccgaggagaagcaggccggcgggtggtgccgcccacagtctacacctacgccatcctgatgaactgctgctgccgcgtgcgtcgtccggacctagggcttgccttatttggccgcctcctaaggacaggcctcaaaacaaattagatcgtcgccagcaccgtcctcaagtgccttgctgcgcaaaacggacagatgaagcagtaaacgtgctgattcataggatgtccgacctcggctgtgtgccaaatgagttctcatacaacacagttctgaagagcctgtgtgaagatagcaggagccagcgagcgctcgatctgctccgggtgatggcaaaaggagatggctgctccccctgcgtggtgtcatacagcactgtcatctatggcttctttaaggaaggaaaagtaggcaaggcatgcaatctatttcatgaaatgacgcagcaaggcgttgtgtctgatgtggtgacatataactcaattatcgatgcactgtgcaaggccagagctatggacaaggctgagctattccttcggcagatggttgatgatgatattcgaccgaatggagtgacatatactgcaatgatccatggatattccactttgggccagtggaaaaaggcgactcaaatgtttagagaaatgacaagccgcggtcttgtaccagatactgtcacttggaactcattcatggcctccctctgcaagcatggaagaagcagagaagctgcagaacttctttattccatggctgcgaagggccacaagcctaatgtcgtatcctactctactttgcttcatgggtatgcaaacgaagggtgctttgctgatatggttaatctttttaattcaatggtaggcaaaggtattgtaccggaccaccatgttttcaacatattcattaatgcatatgctaaatgtgggatgatggatgaagttatgcatatgttgactgaaatgcaggaa

SEQ ID NO: 2453 - DNA, 1290 bp, Triticum aestivum
  source 1..1290: mol_type = genomic DNA
atgtctagaaatggtgttcaaccagatattgtaacttataatatacagatggattatctttgcaagaatggaggatgcgcagaagctaggaaattttttgattccatgatcagtttgggccaaaaaccgactgttactacctacaacattctgcttcatgggtatgctatggaaagatcttttcatgatatgaattgtctcattgatttgatggtaggaaatggtattgcaccagatcataatgtctacaacatactcatatctgcatatgctaaagaagaaacggttggtgaggtaatgcatatatttacaaaaatgcggcagcaaggattgaaccctaatgcagcgagctatggaacggtaataaacttactttgcagaattggcagaatggatgatgctgtgttgcaattcactcaaatgataacggaaggattaactcctgatatcatagttttcaccccccttattagtggtttttgtgcgtgtggcaaactggagaaggttcatgaactattttctgagatgttggatcgcggcatctatcctgataccatgttcttcaccacagttatggaccgcctttgcaaaaatggaagggttatggaagcccgagatatctttgatctgatggtacacatgggtgtaaagcctgacgtgcgtagttatgccacactgatgcatggatactttttagttggtaagatggacgaagtgaggaagttacttgacaatatgtgctcaattggcatggaaccagatgttgtcacctatagcatactgattgatggttactctaagaatggaaggatagatgatgcatttgttgttttcaaggaaatgttggaagggaaggttaagccttgtgttatcacttttactattatgattggtgcgttgcttaaatgtggcaggaaggaagaagccaaagatttgtttgatggtatctgggccaatggattagtgcccaatgttattacatatagcttaatgatacaaaaccttatagaagaaggttctctacaagagtctgatgatctcttcctttctatggagaagaatgggtgtgctgctgactcacgtatgctaaatgctatagttagaaggttacttcagagaggggagatgccaagggctgggacttatctgtctaaaattgacgaggggagcttcacccttgaagcttccacagctggcttattgactgcgcttgcttcaggggggaaatgtcaggaatataaggggttactgcctgaaaaatatcactcttttctggaacagggcactgat

SEQ ID NO: 2454 - DNA, 1290 bp, Triticum aestivum; identical to SEQ ID NO: 2453
  source 1..1290: mol_type = genomic DNA

SEQ ID NO: 2455 - DNA, 1290 bp, Triticum aestivum; identical to SEQ ID NO: 2453
  source 1..1290: mol_type = genomic DNA

SEQ ID NO: 2456 - DNA, 1326 bp, Triticum aestivum
  source 1..1326: mol_type = genomic DNA
atgagcggccactttgtccccgtcgacagacgcatcttggagcagaacatcaaggctcggtaccacgccggagacattggcaccgaggatgcactccacctgtttgacgaattgctccagtgtgctgggtcctcctcgatccgtgccatcaactatctcgttactactgtcggccgtgattcccctgcgctcggcgtctccctcttcaaccgcgtcgcaagtgccaatgtggcaccaaacagtatgacgtacaccatcctcgttgactgctgctgccgtgctggccgcttggacctcggtttcgctgccatgggccacatcatcaagatgggatttgcagcagatgctatcgtcactttcagccacctactcaaggccatctgtgcggagaagaagaccagctatgcaatggacatcgtactccgaataatgcccatgtttaactgcgtacccgacaatttctcctacaacattcttttcaagggtctttgcaacgaaaggagaagccaagaggctcttgagctgattcacatgatggtacagcatggaggtagctgccaacctaatgtggtgtcctataacaccgtagttgatggcctgttgaaagagggtgaggtgggcaaagcttacaccctattttctgaaatgctgcgtcaggggatatcaccggatgttgtgacctgtacttccatcatctctggcatgtgcaaggttcatgcaatggacaaggctgaggaggttcttcaacagatgcttgatagaagaattctgccagatgctgccacatataattgtctgatacatggatattatttattaggacagtgcgaagaggtggatcggattttcaaggaaatgtctagaaatggtgttcaaccaaatattgtaacttacaatatacagatggattatctttgcaagagcggaaggtgcgcagaagctaggaaaatatttgattctatgatcggtttgggccaaaaaccggttgttactacctacagtattctactgcatgggtatgctatggaaaaatcttttcatgatatgcattgtctcattgatttgatggtagaaaatggtattgcaccaaatcatcctgtctacaacatactcatatctgcatgtgctcaagaagaaatggttagtgaggtaatgcatatatttacaaaaatgcggcagcaaggattgaaccctaatgtagcgaactatggagtggttgtaaacttgctttccaggattggccgaatggatgatgctatgtccctattcaatcaaatgataactgaaggattagctcctgatatcatagttttcacccccccttat

SEQ ID NO: 2457 - DNA, 1326 bp, Triticum aestivum; identical to SEQ ID NO: 2456
  source 1..1326: mol_type = genomic DNA

SEQ ID NO: 2458 - DNA, 1326 bp, Triticum aestivum; identical to SEQ ID NO: 2456
  source 1..1326: mol_type = genomic DNA

SEQ ID NO: 2459 - DNA, 1326 bp, Triticum aestivum; identical to SEQ ID NO: 2456
  source 1..1326: mol_type = genomic DNA

SEQ ID NO: 2460 - DNA, 1326 bp, Triticum aestivum; identical to SEQ ID NO: 2456
  source 1..1326: mol_type = genomic DNA

SEQ ID NO: 2461 - DNA, 1326 bp, Triticum aestivum; identical to SEQ ID NO: 2456
  source 1..1326: mol_type = genomic DNA

SEQ ID NO: 2462 - DNA, 1305 bp, Triticum aestivum
  source 1..1305: mol_type = genomic DNA
atgtctcgcctccgcctcctccgccgcagctcctcctccaccacactgatacccctcctccggctcctccgccgctgctccacctccacctccacgtcgccgccctcacgctcctggtctccccgagacgcctttgttgcggccatagagcgtgttcgcgccaggacgctcagcccggaagacgctcaccacctgttcgacgatttgctcggtcaggccaccccggtccccgtgcgcaccctgaacggcttctttgccgtcctcgcccgtgccacgtcctctgccgcctgcatccgagatggccccgcccttgccgtcgctctcttcaaccgcgtgtgccaagaagaggccggtccgcgtgtggcgacgcccacagtccacacctatggcatcctcatggactgctgctgccgcgcacgtcgcccggacctagggctcgccttattcggccgcttcctcgggacaggcctgaggacaaacgagatcgtcgccaccaccttcctcaagtgcctctgctgcgcgaaacggacagaagaggttgtgaaagtactgcttcacagaatgcccgagctgggctgtgtgcctaatgccatctcgtactccatagttttgaaaagcttgtgtgaaaatagcatgagtcagcaggcactcgacctgctccagatggtagggaaagaaggaggctgccttcgtgatgtggtggcatataacacaatcatccatggcttctttaaggagtgcggaatagacaaggcatgccatctattccatgaaatgatgcggcaaggggttgtgccgactgtggtgacatacaacacagtaattgatgcgttgtgcaaggccggagaaatggacaaggcagagctagtctttcagcggatggctcgtaatggtgcgcagcccaataaagtgacatgtaatggcagtaaatttagttcactgactgacggatattgctcagtcggcaagatggataaaacattcaaactgcttgatgccatggtatcagatggaattgagcctgatgctgttacttatagtgcacttcttgatggctattttaaaaatggaaggatcgatgatggtttgactctatttagagaaatgtcgtgcaagggagttaaaccaacaactgtgacatatggcatcatactggatggtttatatcgtgctgggagaactgctgctgccaagaaaatgtttgatcagatgatcaaaagtggaataacagtgaccgtttccatatacactactccctcctttccggtttataaggcatatttcaacttttttgtttttccaatt

SEQ ID NO: 2463 - DNA, 1305 bp, Triticum aestivum
  source 1..1305: mol_type = genomic DNA
atgtctcgcctccgcctcctccgccgcagctcctcctccaccacactgatacccctcctccggctcctccgccgctgctccacctccacctccacgtcgccgccctcacgctcctggtctccccgagacgcctttgttgcggccatagagcgtgttcgcgccaggacgctcagcccggaagacgctcaccacctgttcgacgatttgctcggtcaggccaccccggtccccgtgcgcaccctgaacggcttctttgccgtcctcgcccgtgccacgtcctctgccgcctgcatccgagatggccccgcccttgccgtcgctctcttcaaccgcgtgtgccaagaagaggccggtccgcgtgtggcgacgcccacagtccacacctatggcatcctcatggactgctgctgccgcgcgcgtcgcccggacctagggctcgccttattcggccgcttcctcgggacaggcctgaggacaaacgagatcgtcgccaccaccttcctcaagtgcctctgctgcgcgaaacggacagaagaggttgtgaaagtactgcttcacagaatgcccgagctgggctgtgtgcctaatgccatctcgtactccatagttttgaaaagcttgtgtgaaaatagcatgagtcagcaggcactcgacctgctccagatggtagggaaagaaggaggctgccttcgtgatgtggtggcatataacacaatcatccatggcttctttaaggagtgcggaatagacaaggcatgccatctattccatgaaatgatgcggcaaggggttgtgccgactgtggtgacatacaacacagtaattgatgtgttgtgcaaggccggagaaatggacaaggcagagctagtctttcagcggatggctcgtaatggtgcgcagcccaataaagtgacatgtaatggcagtaaatttagttcactgactgacggatattgctcagtcggcaagatggataaaacattcaaactgcttgatgccatggtatcagctggaattgagcctgatgctgttacttatagtgcacttcttgatggctattttaaaaatggaaggatcgatgatggtttgactctatttagagaaatgccgtgcaagggagttaaaccaacaactgtgacatatggcatcatactggatggtttatatcgtgctgggagaactgctgctgccaagaaaatgtttgatcagatgatcaaaagtggaataacagtgaccgtttccatatacactactccctcctttccggtttataaggcatatttcaacttttttgtttttccaatt

SEQ ID NO: 2464 - DNA, 1308 bp, Triticum aestivum
  source 1..1308: mol_type = genomic DNA
atggttgatctctataattcaatgtcaagcaatggtattgtacccaatcgccaggttttcaacatattaattgatgcatatgctaagcgtggaatgacggatgaagctatgcttatatttactgaaatgcggggacaaggactgagtccagatgtatgcacctattcaactcttatatctgcacttagcagaacgggtaggctggcggatgccatggatagattcagtcagatgatttctattggcatacaaccagacgcagttgtttatcaagctctaattcagggttattgtacagttggtgatttggtgaaagcaaaggttttggtttctgaaatgatgaacagaggtattcctcctcctgacattgtgttctttaattcaataatgactagtctatgcaaagaaggaagggttacagatgcacacagtatccttgacttcgttatacactttggtgtgaggcctagcatcagtacatttaatttgctgattgacgggtattgcttagttggcaagatgaagaaagctttcggagtacttgataccatggcatcagttggcattgagcctgatgatatttcatatagtgcaatcattaatggctgttttaaaaatggaaggatcgatgatggatttaccatattccgagaaatgctgaagaaagttaaacctacaactgttacatataacatcatactgggtgggttattttgtgctgggaaaacagttgctgcaatgaaaatgttccatgagatgatcgaaagtggaataacagtgagcagttccacatacaggacagtccttggaggactttgcaggaatagttgtgaggacgaagcgatcaccctgttccagaaattaggagcaatgaatgtgaagttggatattgcaatactcaataccatgatcaatgcaatgttcaagcttcagagaagagaagaagctaacgatttgttttctgcagtatcagccagtggattggtacctaatgcttctacctatggtgtaatgataaaaaatcttctaagagaaggatcagtggaaaaagctgaaaatatgttctcattaatggagaagagcggttgtgctccggactctcgtcttataaatgatatcatcagaatattactgaagaaaggtgagattgtcaaggctggaaactatatgtctaaagttgatggcaggagcatctcacttgaagcttcaactacttcgttgatgatacgtctcttttcaagtgaagggaaatatcggggacaaataaatttgctccctgtaaagtaccaatttttcgatggagttagt

SEQ ID NO: 2465 - DNA, 1095 bp, Triticum aestivum
  source 1..1095: mol_type = genomic DNA
atggatagattcagtcagatgatttctattggcatacaaccagacgcagttgtttatcaagctctaattcagggttattgtacagttggtgatttggtgaaagcaaaggttttggtttctgaaatgatgaacagaggtattcctcctcctgacattgtgttctttaattcaataatgactagtctatgcaaagaaggaagggttacagatacacacagtatccttgacttcgttatacactttggtgtgaggcctagcatcagtacatttaatttgctgattgacgggtattgcttagttggcaagatgaagaaagctttcggagtacttgataccatggcatcagtaggcattgagcctgatgatatttcatatagtgcaatcattaatggctgttttaaaaatggaaggatcgatgatggatttaccatattccgagaaatgctgaagaaagttaaacctacaactgttacatataacatcatactgggtgggttattttgtgctgggaaaacagttgctgcaatgaaaatgttccatgagatgatcgaaagtggaataacagtgagcagttccacatacaggacagtccttggaggactttgcaggaatagttgtgaggacgaagcgatcaccctgttccagaaattaggagcaatgaatgtgaagttggatattgcaatactcaataccatgatcaatgcaatgttcaagcttcagagaagagaagaagctaacgatttgttttctgcagtatcagccagtggattggtacctaatgcttctacctatggtgtaatgataaaaaatcttctaagagaaggatcagtggaaaaagctgaaaatatgttctcattaatggagaagagcggttgtgctccggactctcgtcttataaatgatatcatcagaatattactgaagaaaggtgagattgtcaaggctggaaactatatgtctaaagttgatggcaggagcatctcacttgaagcttcaactacttcgttgatgatacgtctcttttcaagtgaagggaaatatcggggacaaataaatttgctccctgtaaagtaccaatttttcgatggagttagt

SEQ ID NO: 2466 - DNA, 1095 bp, Triticum aestivum; identical to SEQ ID NO: 2465
  source 1..1095: mol_type = genomic DNA

SEQ ID NO: 2467 - DNA, 1095 bp, Triticum aestivum; identical to SEQ ID NO: 2465
  source 1..1095: mol_type = genomic DNA

SEQ ID NO: 2468 - DNA, 1095 bp, Triticum aestivum; identical to SEQ ID NO: 2465
  source 1..1095: mol_type = genomic DNA

SEQ ID NO: 2469 - DNA, 1308 bp, Triticum aestivum; identical to SEQ ID NO: 2464
  source 1..1308: mol_type = genomic DNA

SEQ ID NO: 2470 - DNA, 1332 bp, Triticum aestivum
  source 1..1332: mol_type = genomic DNA
atggcccgggccttgccatcgccctcttcaaccgcatgtcccgaggcgctggtgcacgggtggtgtcgctgccgtgcaggccgcccggacttggtggttgccttctttggccgcctcctcagattggggctgtgcttgaatgtcatctccttgagcaacctcctcaaggggctctgccaggtcaagcgtacaaatgaggctgtggacttgctgctccaccggacacctgaactggactgtgtgcctaatgtcttctcgtacagcatcgtaatcaacggctgttttaaacaaggtgaagtagacaaagcgtgcaatctcttccatgggatgatccaactgggagttcaacctaatgtggtcatctacacctcaattatcgatgcactaagcaagtgcggagccatggacaaggcagaagtggtctttcggcaaatggttgataaaggtattggacccgatgtcatgacatgcactagtctgatccatggatattccatttcgggtaggtggaaggcggcagtaagggtattcaaagagatgataagtcttggtgttgtaccagataccgtcatgtggaactcatttgtggattcactttgcaagcatagaaggacaaaggaagctagagttatttttgactccatggctgcaaagggccagaaacctgatactgtctcctactctattatgcttaacgggtatgtgaaagaaggatgctttgatgatatgaccggtctcttcaattcgatgctacagaacggtgttgtacctaaccaccatattttcaacatactgatcaatgcatatgctaaacgtggactgatggatgaggctatgcacatgttcgaagtaatgaggcaacaaggagtaaacccagatgtagttgactatctagtagtaatggattcactttgcaaaatgggtaggatggatgctgctctggacaaatttaatcagatggtcaatcaaggagtttcacctaacaaagctgtttaccaatgcctggttctgggttcttgctctcatggtgattttgtgaaagccaaggaattgatttctgaagcacttaatagaggtctctgttctaacagtgtgttcttctatcctgtaataaacgacctgtgcaaagaaggaaaggtgaaggaggcacaggatatgtttgacttcattgtaggtattggtcagcggcccgatgtgattatgtacaattcactgatggatggatattgccttgttggcaaggtggaggaagcactgagagtacttgatgctatgaagtctgctggcctccaacctgatgctattatgtatggtatacttcttaatgatcac

SEQ ID NO: 2471 - DNA, 1332 bp, Triticum aestivum; identical to SEQ ID NO: 2470
  source 1..1332: mol_type = genomic DNA

SEQ ID NO: 2472 - DNA, 1332 bp, Triticum aestivum; identical to SEQ ID NO: 2470
  source 1..1332: mol_type = genomic DNA

SEQ ID NO: 2473 - DNA, 1317 bp, Triticum aestivum
  source 1..1317: mol_type = genomic DNA
atgatgagtctctttaattcaatggaaggcgatggtattgtagccaactcttatgttttcaacatattaattaatgcatatgctaaaggaggaatgatggatgaagctatgctcatacttactgaaatgcggggacaaggactgagtccggatgtattcacctattcaactctggtatctgcattttgcagaatgggtaggctagctgatgctatggataagttcagtcagatgattggtacgggagtacaaccaaacacagttgtttatcattccctagttcagggcttatgtacacatggtgatttggtgaaagcaaaggagttgatttctgaaatgatgaataaaggtatgattcgtccaaacattgcattcttcaattcaataatggacagtctatgcaatgaaggaagggttgtggatgcacaccatatctttgacttggttacagacataggtgagaaacctgatgtcattacatttagtacgctaattgacggatattgcttagtcggtgagatggagaaagcatgccgagtatttgatgccatggtatcagctggcattgagcctgatgtcattacgtatagtacacttgtcagtgggtattgtaaaagtggaaggatcgatgatgggttgattctgttcagagaaatgttgcataaggaagttaaacctacaactgttacatatggcaccgtactggatgggttatttcgtgcttggagatctgctgctgcaaagaaagtgttccatgagatgatcgaaagtggaataatggtgagcatttctatatataatataattcttggaggactttgtagaaataattgcgcagatgaagcgatcgtcctattccagaaattgtgtgcaatgaatgtgaagttcaatatcacaacactcaatatcatgcttaatgcattctacaaggttcaaagaagagatgaagctagtgatttgttcgctgcattaccagccagtgggttggtgcctaatgcttctacttatggagtaatgattcaaaatcttctaaaagaaggagcggtggaagaagctgacagtatgttctcatcaatggagaagagtggttgtgctcctagctctcgtttttcaaattgtatcatcagaacgttattggaacagggggagatagtcaaggctgggaaatatatgtctaaagttgatgggaagacttttttgcttgaagcttcaactacttcattgctgatgtccctcttttcaaggggaggcaaatatcaggagcacatactcttgctccctgcaaagtatcaatttttcagtggagtgaaccacagt

SEQ ID NO: 2474 - DNA, 1317 bp, Triticum aestivum
  source 1..1317: mol_type = genomic DNA
atgatgagtctctttaattcaatggaaggcgatggtattgtagccaactcttatgttttcaacatattaattaatgcatatgctaaaggaggaatgatggatgaagctatgctcatacttactgaaatgcagggacaaggactgagtccggatgtattcacctattcaactctagtatctgcattttgcagaatgggtaggctagctgatgctatggataagttcagtcagatgattggtacgggagtacaaccaaacacagttgtttatcattccctagttcagggcttatgtacacatggtgatttggtgaaagcaaaggagttgatttctgaaatgatgaataaaggtatgattcgtccaaacattgcattcttcaattcaataatggacagtctatgcaatgaaggaagggttgtggatgcacaccatatctttgacttggttacagacataggtgagaaacctgatgtcattacatttagtacgctaattgacggatattgcttagtcggtgagatggagaaagcatgtggagtatttgatgccgtggtatcggctggcattgagcctgatgtcattacgtatagtacacttgtcagtgggtattgtaaaagtggaaggatcgatgatgggttgattctgttcagagaaatgttgcataaggaagttaaacctacaactgttacatatggcaccgtactggatgggttatttcgtgcttggagatctgctgctgcaaagaaagtgttccatgagatgatcgaaagtggaataatggtgagcatttctatatataatataattcttggaggactttgtagaaataattgcgcagatgaagcgatcgtcctattccagaaattgtgtgcaatgaatgtgaagttcaatatcacaacactcaatatcatgcttaatgcattctacaaggttcaaagaagagatgaagctagtgatttgttggctgcattaccagccagtgggttggtgcctaatgcttctacttatggagtaatgattcaaaatcttctaaaagaaggagcggtggaagaagctgacagtatgttctcatcaatggagaagagtggttgtgctcctagctctcgtttttcaaattgtatcatcagaacgttattggaacagggggagatagtcaaggctgggaaatatatgtctaaagttgatgggaagactattttgcttgaagcttcaactacttcattgctgatgtccctcttttcaaggggaggcaaatatcaggagcacatactcttgctccctgcaaagtatcaatttttcagtggagtgaaccacagt

SEQ ID NO: 2475 - DNA, 1317 bp, Triticum aestivum; identical to SEQ ID NO: 2473
  source 1..1317: mol_type = genomic DNA

SEQ ID NO: 2476 - DNA, 1317 bp, Triticum aestivum; identical to SEQ ID NO: 2474
  source 1..1317: mol_type = genomic DNA

SEQ ID NO: 2477 - DNA, 1152 bp, Triticum aestivum
  misc_feature 1111: note = n is a, c, g, or t
  misc_feature 1113: note = n is a, c, g, or t
  misc_feature 1118: note = n is a, c, g, or t
  source 1..1152: mol_type = genomic DNA
atgatgagtctctttaattcaatggaaggcgatggtattgtagccaactcttatgttttcaacatattaattaatgcatatgctaaaggaggaatgatggatgaagctatgctcatacttactgaaatgcggggacaaggactgagtccggatgtattcacctattcaactctggtatctgcattttgcagaatgggtaggctagctgatgctatggataagttcagtcagatgattggtacgggagtacaaccaaacacagttgtttatcattccctagttcagggcttatgtacacatggtgatttggtgaaagcaaaggagttgatttctgaaatgatgaataaaggtatgattcgtccaaacattgcattcttcaattcaataatggacagtctatgcaatgaaggaagggttgtggatgcacaccatatctttgacttggttacagacataggtgagaaacctgatgtcattacatttagtacgctaattgacggatattgcttagtcggtgagatggagaaagcatgccgagtatttgatgccatggtatcagctggcattgagcctgatgtcattacgtatagtacacttgtcagtgggtattgtaaaagtggaaggatcgatgatgggttgattctgttcagagaaatgttgcataaggaagttaaacctacaactgttacatatggcaccgtactggatgggttatttcgtgcttggagatctgctgctgcaaagaaagtgttccatgagatgatcgaaagtggaataatggtgagcatttctatatataatataattcttggaggactttgtagaaataattgcgcagatgaagcgatcgtcctattccagaaattgtgtgcaatgaatgtgaagttcaatatcacaacactcaatatcatgcttaatgcattctacaaggttcaaagaagagatgaagctagtgatttgttcgctgcattaccagccagtgggttggtgcctaatgcttctacttatggagtaatgattcaaaatcttctaaaagaaggagcggtggaagaagctgacartatgttctcatcaatggagaagagtggttgtgctcctagctctcgtcttntnaatgntgtatcatcagaactttattggaaaagggggaga

SEQ ID NO: 2478 - DNA, 1317 bp, Triticum aestivum; identical to SEQ ID NO: 2473
  source 1..1317: mol_type = genomic DNA

SEQ ID NO: 2479 - DNA, 1317 bp, Triticum aestivum; identical to SEQ ID NO: 2474
  source 1..1317: mol_type = genomic DNA

SEQ ID NO: 2480 - DNA, 1080 bp, Triticum aestivum
  source 1..1080: mol_type = genomic DNA
atggactgctgctgccgcgcagaccgcccggacttggtggttgccttcttcggccgcctcctcaggttggggctgcgcttgaatgtcatctccttcaacaacctcctcaaggggctttgccaggctaagcgctcaaatgaggcattggatctgctgctccaccggatgcccgaactggactgtgcgcctgatgtcttctcgttcaacatagtaatcaacggctgctttagagaaggtgaagtagacaaagcatgcaatctcttccatgagatgccccaactgggagttcaacctgatgtggtgacctacaactcaattatcatcgcactaagcagggccggagcaatgggtaaggcagaagtggtccttcggcaaatggttgataaaggcattggaccagatgtcatgacatataacagtctgatccatggatattctactttgggtcagtggaaggcagcagttagggtattcaaagagatggtaagtgttggtgttctaccaaatgctgtcacgttgaactcatttatggattcactttgcaagcatagaaggacaaaggaagctagagatatttttgactccatggctgcaaagggccacaaacctaatattgcctcctactctactatgcttaatgggtatgcgaaacaaggatgcttcgatgatatgactggtctcttcaattccatggtacagaatggtgttgtaccaaaccaccatattttcaacatactgatcaatgcatatgctaaacgtggactgatggatgaggctatgcacatgttcgaagtaatgaggcaacaaggagtaaacccagatgtatttagccatcaaattgtaatggattcactttgtaaaatgggtaggatggatgctgctctggacaaatttaatcagatggtcaatcaaggagtttcacctaacaaagctgtttaccaatgcctggttctgggttcttgttctcatggtcattttgtgaaagccaaggaattgatttctgaagcagttaatagaggtctgtgttctaacagtgtgttcttctatcctgtagtaaacgacctgtgcaaagaaggaagg

SEQ ID NO: 2481 - DNA, 1290 bp, Triticum aestivum
  source 1..1290: mol_type = genomic DNA
atgtctagaaatggtgttcaaccagatattgtaacttacagtatacagatggattatctttgcaagagcggaagatgcacagaagctaggaagatttttgattctatgatcagtttgggccaaaaaccgaccgttactacctacaacattctgcttcatgggtatgctatggaaagatctttttatgatatgaattgtctcattgagttgatggatgataatggtatttcaccagatcattatggctacaacatactcatatctgcttatgctaaagaagaaacggttggtgaggtaatgcatatatttacaaaaatgcggcagcaaggattgaaccctaatgttgtgaactatggagcggtaataaatttgctttctagtattggccgaatggatgatgctatgtcccaattcaatcaaatgataactgaagggttagctcctgatatcatagttttcaccccccttattagtggtttctgttcttgtggcaaatgggagaaggttcatgaactattttctgagatgttggatcgcggcatctatcctaataccgtgttcttcaccacagttatggaccgcctttgcaaaaatggaagggctatggaagcccgagatatctttgatctgatggtacacatgggtgtaaagcctgacgtgcgtagttatgccacactgatgcatggatactttttagttggtaagatggatgaagtgaggaagttacttgacaatatgtgctcaattggcatggaaccagatgttgtcacctatagcatactgattgatggttactctaagaatggaaggatagatgatgcatttgttgttttcaaggaattgttggaagggaaggttaagccttgtgttatcacttttaatattatgattggtgcattgcttaaatgtggcgggaaggcagaagccaaagatttgtttgacggtatctgggccaacggattagtgcccgacgttattacatatagcttaatgatacaaaaacttattgaagaaggttctctacaagagtctgatgatctcttcctttctatggagaagaatgggtgtgctgctgactcacgtatgctaaatgctatagttagaaggttacttcagagaggggagatgccaagggctgggacttatctgtctaaaattgacgaggggagcttcacccttgaagcttccacagctggcttattgactgcgcttgcttcaggggggaaatgtcaggaatataaggggttactgcctgaaaaatatcactcttttctggaacagggcactggt

SEQ ID NO: 2482 - DNA, 663 bp, Triticum aestivum
  source 1..663: mol_type = genomic DNA
atgttgcgcaagggacttaaacctacaacttttaattacaacgtcatactggatggattatttctggctggacgaactgttgctgcaaaggaaaagtttgatgagatggttgaatctggagtaagtgtgtgcattgatacatattcgatagttcttggtggactttgtagaaataattgtagcggcgaagcaatcacgctattccagaaattaagcacaatggatgtgaaattcaatattataattgtcaatataatgattgatgccttctacagggttcagcgaaaccaagaagccaaggatttgtttgctgcagtatcagccaatggtttggtagctaatgtctttacctacaccataatgatgaaaaatcttataaaagaagggtcagtggaagaagctgacgatctctttttatcaatggagaagagcggctgtactgctgactcttatatgttaaatcttattgtcagaatgttactggaaaaaggagagctagtcaaggctgggaattatatgtctaaagttgatgcaaagagctactcacttgaagctgaaaccgtttcgctgcttatctctctcttttcagggaaagggaaatatagagaacacataggattgctccctacaaagtatcggtttcgtgaagaagcagccacagtt

SEQ ID NO: 2483 - DNA, 1296 bp, Triticum aestivum
  source 1..1296: mol_type = genomic DNA
atggctatcaagggcctgaaacctgacaacgtttcatatgctattcgccttcatgggtatgccaccgaaggatgcttcgttgatatgattaatctcttcaattcaatggaaagagactgcattcttcctgactgtcgtatcttcagcatactaatttatgcatatgctaaatctgggaagcttgataaggctatgctcatcttcaatgaaatgcagaaacaaggagtgagtccaaatgcagtcacatattcaaccgtaatagatgcattttgcaaaaagggtaggttggatgatgctgtgataaagtttaatcagatgattgatacaggagtacgaccggacacggctgtttatagttccctaatccagggattttgtacacgtggagatttggtgaaagcaaaggaattgcttactaaaatgatgaacaaaggtatacctccttctgatattaagttcttcagttcaatcatgcagaacctatgcacagaaggaagggtaacagaagcacgggatgtccttggcttgatagcgcacataggtatgaggcctaatgtttgcacatttaatatactgatcggtggatactgcctagtcggcaagatggaggatgcctcaaaaatatttgatgacatgatgtcatatggcttagaaccttctaatattacgtatggtatacttattaatggctattgcaaaaacttaaggattgacgatgggctgattctgttcaaagaaatgttgcgcaagggacttaaacctacaacttttaattacaacgtcatactggatggattatttctggctggacgaactgtttctgcaaaggaaaagtttgatgagatggttgaatctggagtaagtgtgtgcattgatacatattcgatagttcttggtggactttgtagaaataattgtagcggcgaagcaatcacgctattccagaaattaagcacaatggatgtgaaattcaatattacaattgtcaatataatgattgatgccttctacagggttcagcgaaaccaagaagccaaggatttgtttgctgcagtatcagccaatggtttggtagctaatgtctttacctacaccataatgatgaaaaatcttataaaagaagggtcagtggaagaagctgacgatctctttttatcaatggagaagagcggctgtactgctgactcttatatgttaaatcttatcgtcagaatgttactggaaaaaggagagctagtcaaggctgggaattatatgtctaaagttgatgcaaagagctactcacttgaagctaca

SEQ ID NO: 2484 - DNA, 1296 bp, Triticum aestivum; identical to SEQ ID NO: 2483
  source 1..1296: mol_type = genomic DNA

SEQ ID NO: 2485 - DNA, 663 bp, Triticum aestivum
  source 1..663: mol_type = genomic DNA
atgttgcacaagggacttaaacctacaacttttaattacaacgtcatactggatggattatttctggctggacgaactgttgctgcaaaggaaaagtttgatgagatggttgaatctggagtaagtgtgtgcattgatacatattcgatagttcttggtggactttgtagaaataattgtagcggcgaagcaatcacgctattccagaaattaagcacaatggatgtgaaattcaatattataattgtcaatataatgattgatgccttctacagggttcagcgaaaccaagaagccaaggatttgtttgctgcagtatcagccaatggtttggtagctaatgtctttacctacaccataatgatgaaaaatcttataaaagaagggtcagtggaagaagctgacgatccctttttatcaatggagaagagcggctgtactgctgactcttatatgttaaatcttattgtcagaatgttactggaaaaaggagagctagtcaaggctgggaattatatgtctaaagttgatgcaaagagctactcacttgaagctgaaaccgtttcgctgcttatctctctcttttcagggaaagggaaatatagagaacacataggattgctccctacaaagtatcggtttcgtgaagaagcagccacagtt

SEQ ID NO: 2486 - DNA, 663 bp, Triticum aestivum; identical to SEQ ID NO: 2482
  source 1..663: mol_type = genomic DNA

SEQ ID NO: 2487 - DNA, 1296 bp, Triticum aestivum; identical to SEQ ID NO: 2483
  source 1..1296: mol_type = genomic DNA

SEQ ID NO: 2488 - DNA, 1296 bp, Triticum aestivum; identical to SEQ ID NO: 2483
  source 1..1296: mol_type = genomic DNA

SEQ ID NO: 2489 - DNA, 663 bp, Triticum aestivum; identical to SEQ ID NO: 2482
  source 1..663: mol_type = genomic DNA

SEQ ID NO: 2490 - DNA, 663 bp, Triticum aestivum; identical to SEQ ID NO: 2482
  source 1..663: mol_type = genomic DNA

SEQ ID NO: 2491 - DNA, 663 bp, Triticum aestivum; identical to SEQ ID NO: 2482
  source 1..663: mol_type = genomic DNA

SEQ ID NO: 2492 - DNA, 1317 bp, Triticum aestivum
  source 1..1317: mol_type = genomic DNA
atgccaaccgcccgcctgtcctccatctccacctcctccttcagggctccttcacgtaaaccacgagcccccctcgccgccttggctgccgccacggaacgcgttcgcgctggaacgctaagccgggaggacgcacaccacctgttcgacgaattgcaaggccaagccgccgccgtcccggaacgcgggctcaacaactttcttgccgcactagcccgtgctccgccctcatctgcctgcagcgatggtccgggccttgcctttgccctcttcaaccgcatgtcccgaggcgctggtgcacgggtggtgtcgcctacgctctgtacctattccatcctcatggactgctgctgccgcgcaggccgcccggacttggtggttgccttcttcggccgcctcctcaggttggggctgcgcttgaatgtcatctccttcaacaacctcctcaaggggctctgccaggccaagcgttcaaatgaggctttggacatgctgctccaccggatgcccgaacaggactgtgcgcctgatgtcttctcgttcaacatagtaatcaacggctgctttagagaaggtgaagtagacaaagcatgcaatctcttccatgagatgccccaactgggagttcaacctgatgtggtgacctacaactcaattatcatcgcactaagcagggccggggcaatgggtaaggcagaagtggtccttcggcaaatggttgataaaggcattggacccgatgtcatgacatataacagtctgatccatggatattctactttgggtcagtggaaggcagcagttagggtattcaaagagatggtaagtgttggtgttctaccaaatgctgtcacgttgaactcatttatggattcactttgcaagcatagaaggacaaaggaagctagagatatttttgactccatggctgcaaagggccacaaacctaatattgcctcctactctactatgcttaatgggtatgcgaaacaaggatgcttcgatgatatgactggtctcttcaattcgatgctacagaatggtgttgtaccaaaccaccatattttcaacatactgatcaatgcatatgctaaacgtggactgatggatgaggctatgcacatgttcgaagtaatgaggcaacaaggagtaaacccagatgtatttagctatcaaattgtaatggattcactttgtaaatgggtaggatggatgctgctctggacaaatttaatcagatggtcaatcaaggagtttcacctaacaaagctgtttaccaatgcctggttctgggttcttgttctcatggtcattttg

SEQ ID NO: 2493 - DNA, 1293 bp, Triticum aestivum
  source 1..1293: mol_type = genomic DNA
atgccaaccgcccgcctgtcctccatctccacctcctccttcagggctccttcacgtaaaccacgagcccccctcgccgccttggctgccgccacggaacgcgttcgcgctggaacgctaagccgggaggacgcacaccacctgttcgacgaattgcaaggccaagccgccgccgtcccggaacgcgggctcaacaactttcttgccgcactagcccgtgctccgccctcatctgcctgcagcgatggtccgggccttgcctttgccctcttcaaccgcatgtcccgaggcgctggtgcacgggtggtgtcgcctacgctctgtacctattccatcctcatggactgctgctgccgcgcaggccgcccggacttggtggttgccttcttcggccgcctcctcaggttggggctgcgcttgaatgtcatctccttcaacaacctcctcaaggggctctgccaggccaagcgttcaaatgaggctttggacatgctgctccaccggatgcccgaactggactgtgcgcctgatgtcttctcgttcaacatagtaatcaacggctgctttagagaaggtgaagtagacaaagcatgcaatctcttccatgagatgccccaactgggagttcaacctgatgtggtgacctacaactcaattatcatcgcactaagcagggccggggcaatgggtaaggcagaagtggtccttcggcaaatggttgataaaggcattggacccgatgtcatgacatataacagtctgatccatggatattctactttgggtcagtggaaggcagcagttagggtattcaaagagatggtaagtgttggtgttctaccaaatgctgtcacgttgaactcatttatggattcactttgcaagcatagaaggacaaaggaagctagagatatttttgactccatggctgcaaagggccacaaacctaatattgcctcctactctactatgcttaatgggtatgcgaaacaaggatgcttcgatgatatgactggtctcttcaattcgatgctacagaatggtgttgtaccaaaccaccatattttcaacatactgatcaatgcatatgctaaacgtggactgatggatgaggctatgcacatgttcgaagtaatgaagcaacaaggagtaaacccagatgtagttractatctagtagtaatggattcactttgcaaaatgggtaagatggctgctgctatggataaatttaatcagatgatcaatcaaggagtttcacctaacaaagctgtttaccaatgcctgggaaaa

SEQ ID NO: 2494 - DNA, 1236 bp, Triticum aestivum
  source 1..1236: mol_type = genomic DNA
atgagccgccgcatggtccgacgcgtcttggagcggaacatcgaggagcggtaccgcgcggggcacattggcaccgaggacgcactccacctgttcgacgaattgctccaggttgccgggccctcctcgacccgcgccatcaactgcctcctctacgttgtcggccgtgattgccctgctctcggcgtctccctcttcaaccgggtcgcaagagccaaggtgcccccacacaatgtcacctacagcatcctcatcggctgctgctgccatgcgggccggttagacctcggtttcgccgccatgggcaacatcattaagctgggttttgcggctgaagccatgttcagtttcagccacctactcagggccgtctgcgcggagaacaagaccagctatgcaatggacatcgcactccggcgaatgcccgagtttaactgcacaccgaatgttttctcctatagcattcttctcaaaggtctctgtgttgagaagagaagtcaagaggctcttgagcttattcacatgatggtcgatgctggaggtagctgccaacctaatgtggtgtcctatagcactgtagttgatggcctgttgaaagagggtgaggtgaacaaagcttacagcttactttgtgaaatgctacatcaggggatttcaccgaatgttgtgacgtatagctcaatcatctttagcatgtgcaaggttcaagcaatggataaggccgaggaggtccttcaacagatgtttgatacaggtattctgccaaatattactacatataatagtctgatacacggatattattcatcaggacagtgcgaagaggtggttcgtattttcaagaaaatgtctaggaatggtgttcagccagatattgcaacttacaacatacagatggattatctttgcaagagtagaagatttgcggaagctagaactatttttgattctatggccggtaaggaccaaaaaccgaatgttactagctgcagtattctgcttcatgcgtatgctatggaacagtcattccatgatatgcattgtctcattgaattgatggtagaaaatggtattgcaccagatcattctgtgtacaacatactgatagttgtatatgctaaggggaaaatggttgatgaggtaatgcatatatttacaaaaatgcggcagcaaggattgaacccaaatgctgcgaactatggaacagtaataaacttacagtattggccgaatgga

SEQ ID NO: 2495 - DNA, 1236 bp, Triticum aestivum; identical to SEQ ID NO: 2494
  source 1..1236: mol_type = genomic DNA

SEQ ID NO: 2496 - DNA, 1236 bp, Triticum aestivum; identical to SEQ ID NO: 2494
  source 1..1236: mol_type = genomic DNA

SEQ ID NO: 2497 - DNA, 1236 bp, Triticum aestivum; identical to SEQ ID NO: 2494
  source 1..1236: mol_type = genomic DNA

SEQ ID NO: 2498 - DNA, 1236 bp, Triticum aestivum; identical to SEQ ID NO: 2494
  source 1..1236: mol_type = genomic DNA

SEQ ID NO: 2499 - DNA, 1236 bp, Triticum aestivum; identical to SEQ ID NO: 2494
  source 1..1236: mol_type = genomic DNA

SEQ ID NO: 2500 - DNA, 1275 bp, Triticum aestivum
  source 1..1275: mol_type = genomic DNA
atgtccaacctccgcctcctccgccgcagctcctcctccatgtccaccaccacgtcgccgccctcgcgctcctggtccccccattcggcctttgccgcggccacagagcgcgtgcgcgccgggacgctcagccaagacgatgcacaccacctgttcgacgaattgctgcggcaggccaccccggtccacgagcgctccctcaacggcttcctcgccgccctcgcgcgtgctacgtcctctgccgcttgcatcagagatggtcccgccctcgccatcgccctcttcaatcgcgtgtgccgagaacaagccggcccgcgggtggcgcctctcacagtccacacctacggcatcctcatggaatgttgttgtcgggcgggtcacccggaattagggcttgccatattcagccgtcttctcaggacggggctcaagacaaacgagatagtcggcagcaccttcctcaagtgcctctcctacacaaaacggacggatgaggctctgaacgtgttgcttcataggatgcccgagctcggctgtgtgcctaatgccttctcatactccattgttctgaagagcttatgcgacaatagcatgagtcagcgggcgcttgacctgctccagaggatggcgaaagaaggaggtggctgcttccttaatgtggtgacatatagcacggtcatccatggcttctttaaggaaggtgaaataggcaaggcatgcagtctgttccatgaaatgatgcagcaagggattgagcccgatgtgtggacgtataactcgattattgatgcattgtgcaaggccagagcaatggacaaggcagagctagtccttcgtcagatggttgctaaaggtgctcaacccgatacagtgacatataattgcatgatcaatggatatgccacatctgggcggttgaaagaggctgctaaaatgttcagagaaatgaaaagccggggtgttacaccaaatattgttacctgcggctcgttaatgacttccctttgcaagcatggaagaagcaaagaagctagacaaatatttgattccatgactgccaaaggccacagagctaatgtcgtctcatactctattttgcttcatgggtatgccaatgaaggatgctttgctgatatgattgatctctttaattcaatgaaaagcaacggtattgcagccgactgccatgttttcaacatattaattaatggatatgctaaacgtggaatgatggatgaagctgtgctgatattactgaaatgcgggaaaaaggag

SEQ ID NO: 2501 - DNA, 1275 bp, Triticum aestivum; identical to SEQ ID NO: 2500
  source 1..1275: mol_type = genomic DNA

SEQ ID NO: 2502 - DNA, 1275 bp, Triticum aestivum; identical to SEQ ID NO: 2500
  source 1..1275: mol_type = genomic DNA

SEQ ID NO: 2503 - DNA, 1275 bp, Triticum aestivum; identical to SEQ ID NO: 2500
  source 1..1275: mol_type = genomic DNA

SEQ ID NO: 2504 - DNA, 1275 bp, Triticum aestivum; identical to SEQ ID NO: 2500
  source 1..1275: mol_type = genomic DNA

SEQ ID NO: 2505 - DNA, 1275 bp, Triticum aestivum; identical to SEQ ID NO: 2500
  source 1..1275: mol_type = genomic DNA

SEQ ID NO: 2506 - DNA, 1287 bp, Triticum aestivum
  source 1..1287: mol_type = genomic DNA
atggaacatgcctcaaaaatatttgatgatatgatgtcacatggcttagaaccttctaatattacgtatggtatacttattaatggctattgcaaaaatagaaggattgatgacgggcttattctgttcaaagagatgctgcacaagggacttaaacctacaacttttaattatagcttggacattgctatggacaaatttaaccagatggttgatatgggagtacgaccgaatgcaattgtttatcattccctaatccagggtttttgtacacatggggatttagtgaaagcaaaggaattggttgctgaaatgaggaacaaagctatgcgtcctcctgatattaagttcttccattcaataatgcagaacctatgcacggaaggaagggtaatagaagcacgagatatcctcgacttgatagtgcgcattggtatgaggcctgatgttcccatctttaatttactgatcggtggatactgcctagtccgcaagatggcagatgcatcaaaaatatttgatgatatggtgtcatatggtttagaaccttcaaatattacgtatggtatacttattaatggctattgcaaaaatagaaggattgatgaggggctgattctgttcaaagaaatgttgtgcaagggacttaaacctacaacttttaactataacgtcatactggatggattatttctggctggacgaactgttgctgcaaaggaaaagtttgatgagatggttgaatctggagtaagtgtgtgcattggtacatattcgatagttcttggtggactttgtagaaataattgtagcggcgaagcaatcacgctattccagaaattaagcacaatggatgtgaaattcaatattataattgtcattgatgctttctacaaggttcagcgaaaccaagaagccaaggatttgtttgctgcagtatcagccaatggtttggtagctaatgtctttacctacaccataatgatgaaaaatcttataaaagaagggtcagtggaagaagctgacgatctctttttatcaatggagaagagcagctgtactgctgactcttatatgttaaatcttatcgtcagaatgttactgggaaaaggagagatagtcaaggctgggaattatatatctaaaattgatgcaaagagctactcacttgaagctaaaactgtttcgctgcttatctctctcttttcagggaaagggaaatatagagaacacataggattgctccctgcaaagtatcggtttcgtgaagaagcagctacagttgtg

SEQ ID NO: 2507 - DNA, 1089 bp, Triticum aestivum
  source 1..1089: mol_type = genomic DNA
atgtcccgcctccgcccccgccgctcctccaccacgcccatgttccacctcctccgccgtagctcctcctctacctccacctccacccccaccttgcggccctcgcgttcctggtctccccacgccgcctttgccgccgccacggagcgcgtccgcgccgggacgctcagccctgaagacgcgcaccacctgttcgacgaattgctacggcaggccaccccggtccccagccgctccctggacggtttcattgccgccctcgcccgtgcgcccgcctccgccgcctgcatcagagatggtcccgccctcgcccttggcctcttcaaccgcgtctgccgtgatgaagccggcgcgcgggtggcaccacgcacaatcttcacttacggcatcctcatgaactgctgctgctgcgcacatcgcccggacctagggcttgccttattcggccgcttcctcaggacgggcatgaaggcaaatgaaatcattgccaccaccttcctcaagtgcctctgctccgccaaacgtacagatgaggctgtcaacttgctgcttcataggattcccgagcttggctgcgtgcgtaatgccttctcatactccattgttctgaagagcttttgcgagaatagcatgagtcagcgggggctcgacctgctccagatgatggcgaaagaaggaggcgcctgctcccccaacgtggtggcatatagcacggtcatccatggcttctttaaggaaggcgaaacaggcaaggcatgcaatctattccatgaaatgatgcagcaaggtgttgtgcccactgtggcgacatataactcgattattgatgcgttgtgcaaggccagagcaatggacaaggcagagatagtccttcggcagatggttgataatggtgctcaaccggataattggacatataattgcatgatccatggatattcgacatcagggcagttgagagaggctactaaaatgttaagaaaaatgacaacccggggtcttataccagatattgttacttgcagctcgctcatggcttccctttgcaagcatggaagaagcaaagaagcgtcagacttttttgttcca

SEQ ID NO: 2508 - DNA, 1089 bp, Triticum aestivum
  source 1..1089: mol_type = genomic DNA
atgtcccgcctccgcccccgccgctcctccaccacgcccatgttccacctcctccgccgtagctcctcctctacctccacctccacccccaccttgcggccctcgcgttcctggtctccccacgccgcctttgccgccgccacggagcgcgtccgcgccaggacgctcagccctgaagacgcgcaccacctgttcgacgaattgctacggcaggccaccccggtccccagccgctccctggacggtttcattgccgccctcgcccgtgcgcccgcctccgccgcctgcatcagagatggtcccgccctcgcccttggcctcttcaaccgcgtctgccgtgatgaagccggcgcgcgggtggcaccacccacaatcttcacttacggcatcctcatgaactgctgctgctgcgcacatcgcccggacctagggcttgccttattcggccgcttcctcaggacgggcatgaaggcaaatgaaatcattgccaccaccttcctcaagtgcctctgctccgccaaacgtacagatgaggctgtcaacttgctgcttcataggattcccgagcttggctgcgtgcgtaatgccttctcatactccattgttctgaagagcttttgcgagaatagcatgagtcagcgggggctcgacctgctccagatgatggcgaaagaaggaggcgcctgctcccccaacgtggtggcatatagcacggtcatccatggcttctttaaggaaggcgaaacaggcaaggcatgcaatctattccatgaaatgatgcagcaaggtgttgtgcccactgtggcgacatataactcgattattgatgcgttgtgcaaggccagagcaatggacaaggcagagatagtccttcggcagatggttgataatggtgctcaaccggataattggacatataattgcatgatccatggatattcgacatcagggcagttgagagaggctactaaaatgttaagaaaaatgacaacccggggtcttataccagatattgttacttgcagctcgctcatggcttccctttgcaagcatggaagaagcaaagaagcgtcagacttttttgttcca

SEQ ID NO: 2509 - DNA, 1089 bp, Triticum aestivum; identical to SEQ ID NO: 2507
  source 1..1089: mol_type = genomic DNA

SEQ ID NO: 2510 - DNA, 1089 bp, Triticum aestivum; identical to SEQ ID NO: 2507
  source 1..1089: mol_type = genomic DNA

SEQ ID NO: 2511 - DNA, 1089 bp, Triticum aestivum; identical to SEQ ID NO: 2507
  source 1..1089: mol_type = genomic DNA

SEQ ID NO: 2512 - DNA, 1089 bp, Triticum aestivum; identical to SEQ ID NO: 2508
  source 1..1089: mol_type = genomic DNA

SEQ ID NO: 2513 - DNA, 1299 bp, Triticum aestivum
  source 1..1299: mol_type = genomic DNA
atgtcacgccttcaggtccgctctttctccagccccgtttcctcacgcgccaacgatctgctgaccgaactccacggccatctgggcttcgggacgctcaggccagagctcgcgcaccaactgttcgacgaaatgctgcgccaacctgtcccagtatcagcgcgtgcactcaacggcttatttgctgccctcgcatgtgcgccgccctccgccgcctgcaccgacggccctgtcctcgccatccatcttttcaaccgcatggcccgagcaggctgccgcagggtgatagcactcaccagtcacacctacagcatactaattgaatgttgctgccgcgcgcgccgtccggacctagggccttccttcttcactcaccttctcaagacaggcgtcacggcagacatcgtaatctatagtggcttattcaagtgcctctgcgacttgaagtgcacagaggaggctttggatatgctgctccacagaatgccgaacgacgtaagtgatgccatctcctactcagtaattctcaagagtctttgcgacaacgggaggagccagcttgcgcttgacgtgctccatataatgaccaaaaaaggtgctgactactccccggatgtgtttgcatacaacatggtaatcgatggcttctttaaggaaggtgaagtaagcaaagcatgcgatctgttccatgaaatgatacaacagggggttgtgcccgatgtggcgatgtatacctccattatcaatgcgctatgcaaagcaagagcaatggacaaggcagaggtggttcttcaatcaatggttcataatggtgtccaaccagatgttgtgacatatactatcctgatccaaggatattcaactttgagacagttgaaagaagtcgctaggttgttgaaagtgatgagaagccaaggtgttatgccaagcgttgttacctacaactcactcatgacctgcctttgcaagaatggaagattcaaggaagctgtagaaattttttattcaatggctgtgaagggcctaaaacctaatgtcatctcatactctataatactccatggatacgctaaagaaggatcccttgttgccatgattgatctctatcagttgatggcagcagaaggggtcatacctgacctccattgtttcaacatactaattgctgcatatgctgaatatggaatgatggatgtggctatgcttttcttcgaagacatgttgaagcagggggtgaaccctaatgaagtcacaaattttgtctgtgatagctggattatgcaaaatgggcaggatgga

SEQ ID NO: 2514 - DNA, 1299 bp, Triticum aestivum
  source 1..1299: mol_type = genomic DNA
atgtcacgccttcaggtccgctctttctccagccccgtttcctcacgcgccaacgatctgctgaccgaactccacggccatctgggcttcgggacgctcaggccagagctcgcgcaccaactgttcgacgaaatgctgcgccaacctgtcccagtatcagcgcgtgcactcaacggcttatttgctgccctcgcatgtgcgccgccctccgccgcctgcaccgacggccctgtcctcgccatccatcttttcaaccgcatggcccgagcaggctgccgcagggtgataccactcaccagtcacacctacagcatactaattgaatgttgctgccgcgcgcgccgtccggacctagggccttccttcttcactcaccttctcaagacaggcgtcacggcagacatcgtaatctatagtggcttattcaagtgcctctgcgacttgaagtgcacagaggaggctttggatatgctgctccacagaatgccgaacgacgtaagtgatgccatctcctactcagtaattctcaagagtctttgcgacaacgggaggagccagcttgcgcttgacgtgctccatataatgaccaaaaaaggtgctgactactccccggatgtgtttgcatacaacatggtaatcgatggcttctttaaggaaggtgaagtaagcaaagcatgcgatctgttccatgaaatgatacaacagggggttgtgcccgatgtggcgatgtatacctccattatcaatgcgctatgcaaagcaagagcaatggacaaggcagaggtggttcttcgatcaatggttcataatggtgtccaaccagatgttgtgacatatactatcctgatccaaggatattcaactttgagacagttgaaagaagtcgctaggttgttgaaagtgatgagaagccaaggtgttatgccaagcgttgttacctacaactcactcatgacctgcctttgcaagaatggaagattcaaggaagctgtagaaattttttattcaatggctgtgaagggcctaaaacctaatgtcatctcatactctataatactccatggatacgctaaagaaggatcccttgttgccatgattgatctctatcagttgatggcagcagaaggggtcatacttgacctccattgtttcaacatactaattgctgcatatgctgaatatggaatgatggatgtggctatgcttttcttcgaagacatgttgaagcagggggtgaaccctaatgaagtcacaaattttgtctgtgatagctggattatgcaaaatgggcaggatgga

SEQ ID NO: 2515 - DNA, 1299 bp, Triticum aestivum; identical to SEQ ID NO: 2513
  source 1..1299: mol_type = genomic DNA

SEQ ID NO: 2516 - DNA, 1299 bp, Triticum aestivum; identical to SEQ ID NO: 2513
  source 1..1299: mol_type = genomic DNA

SEQ ID NO: 2517 - DNA, 1299 bp, Triticum aestivum; identical to SEQ ID NO: 2513
  source 1..1299: mol_type = genomic DNA

SEQ ID NO: 2518 - DNA, 1299 bp, Triticum aestivum; identical to SEQ ID NO: 2513
  source 1..1299: mol_type = genomic DNA

SEQ ID NO: 2519 - DNA, 1203 bp, Triticum aestivum
  source 1..1203: mol_type = genomic DNA
atggcccgagcaggccgtcgccaggcgacaacacccaccatttacacctacaacatactaatggagtgttgccaccgagcatgctgcccagacctagggcttgccttcttcggccgcctcctcaagacaggcatcccgacaaacatcattgactacagcagcttgttcaagtgcctctgtgacatgaagcgcacagaggaggctctgaacgtgctgctccataagatgcccgacgacctgcctaatgtcatctcctactcagtgattctcaagagcttctgcgacaatgggaggagccagcttgcgcttgatctgctccagatgatggccaaaaaaggcgctgaccactcccccgacgtgatgtcatataacatggtaattggtggcttctttaaggagggtgaagtaagcaaagcatgcgatctattccaagaaatgatacgacacgggattgtgcctactgaggtgacatatagctccattatcaatgcgctatgcaaagcaagagcaatggacaaggcagaggtggttcttcgatcaatggttcataatggtgcccaaccagatgctgtgacatataatagcttgatccaaggatattcaactttgggacagttgaaagaagtcgctaggttgttgaaagtgatgagaagccaaggtgttatgccaagcgttgttacctacaactcactcatgacctgcctttgcaagcatggaaaaaccaaagaagctgagaaaatattttattctatggccgtgaacggacgaaaacctgatgtcatctcatactctattttgctccatgggtacgctaaagaaggatccctcattgatatgattgatctctgtgagcggatgccaagagatggagttgtacccaacctccattgtttcaacatactgattaatgcatatgctaagcatggaatgatggatgtggccctgcttttcttcgaagatatgttgaagcaggtggtgaagcctaatgaattcacttatttaactgtgatatctgcattttgcaagatgggcaggatggatgatgcgatggaaaaattccgtgagatgattgatatgggagtaccagttgacacagaagtttacatgtgcatagttgagggttattttaaaaatggtgattcagtgaaagccaaggattttattaccaaaatgattccaaataggccacagaagggtaattat

SEQ ID NO: 2520 - DNA, 1284 bp, Triticum aestivum
  source 1..1284: mol_type = genomic DNA
atgttttctcctacactattcttttcaagtctctgcaacgagaaaagaagccaagaggctctcgagctgattcacatcatggttgaccatggaggtagttgccaacctaatgtggtgtcctataacactgtagttgatggcctgttgaaagagggtgaggcaggcaaggcttacagcctattttctgaaatgctgcgtcaggggatatcaccggatgttgtgacctgtagttcaatcatcgctggcatctgcaaggttcatgcgatggacaaggctgagcaggttcttcaacagatgcttgatagaggaattctgccaaatgttgctacatatactagtctaatacatggatattattcattaggacagtgcgaagaggtggatcgggttctcaaggaaatgtctagaaatggtgttcaaccaaatattgtaacttacaatatacagattgattatctttgcaagagtggaagatgtgcagaagctaggaagatttttgattctatgatcagtttgggccaaaaaccgactgttactacctacagtattctgcttcatgggtatgctatagaaaaatcttttcatcatatgcattgtctcattgatttgatggtggaaaatagtattgcaccagatcattttgtctacaacatactcatatctgcatatgctaaagaagaaatggttagtgaggtattgcatatatttacaaaaatgcggcagcaaggattgaaccctaatgtagcgagctacggtgtgataataaacttgctttccagtattggccgaatggatgatgctatgtccaaattcaatcaaatgataactgaaggattagctcctaatatcatagttttcagtaccgttattagtggtttttattcttgtggcgcatgggagagggttcatgaaatattttctgaaatgttgaatcgtggcatctatcctgctaccgtgttcttcaacataattatggaccacctttgcaaagagggaagggttatggaagcccaggatatcttcgacctgatggtacacatgggtgtgaagcctgtcgtccataattataaaacactgatacatggatactggtcagttagtaagatggatgaagtgagcaagttacttgacaatgtggtcttaattggcatggaaccagatgttgtcacctataacacactgattgacggttactctaagaatggaaggatagatgatgcattggttgttttcagggaaatgatggcgggaaggttaagccttctgttatcacttttactatta

SEQ ID NO: 2521 - DNA, 1239 bp, Triticum aestivum
  source 1..1239: mol_type = genomic DNA
atgtcccgcctccgccactcctccgccacgccgatctccagcctccgcctcctccgccacatctcctcttccacctccacccccacccccacgtcgccaacctcatgctcctggtcaccccatgccgcctttggcgcggccacggagcgtgtccgtgccgggacactcaggccggaagacgcacacaccctgttcgacgaattgcttcggcaggccacaccggtccccgagcgctccctcaacggcttccttgccgccctcgcccgcgcgcccgcctccggcaactgcatcagagatggccccgcccttgcagtggctctcttcagccgtgtgtgcagagaggaagccggcccgcaggtggcggcgctcacagtttgcacctacaacatcctcatggactgctgctgccgtgcgcgtcgcccggagctagggcttgccttatttggccgcttcctcaggaagggcctcaagacagaccagaccggcgccagcaccttcctcaagtgcctctgctacgcaaaacggacggatgaggcagtggacgttttgcttcataggatgtccgagcttgggtgtgtgcctgatgccatctcatacaacactgttctgaagagcttatgcgacaatggcatgagccagcgggggctcgaactgctccagctggtggcgggaaaaggaggtggctgcttccctgatgtggtggcgtatagcacggtcatccatggcttttttcaggagggtgaagcagggaaggcatgcagtctattccatgaaatgatgcagcaagggattgtgcccagtgtggtgacatatagctcgatcattgatgcgttgtgcaaggccagagcaatggacagggcagagctagtccttcggcagatggttgctaatggtgctcaacccgatacagtgacatataattgcatgatcaatggatatgccacatctgggcggttgaaagagtctgctaaaatgttcagagaaatgaaaagccggggtcttatgccagatattgttacttgcaactccttcctgtcctccctttgcaagcatggaagaagcaaagaagctgcagaattttttgattccatgaccgccaagggccacaaaccggatatcgtctcataccgtattttgcttcatgggtatgctactgaaggatgctttgctgatatgattgacctctttaatgcaatggaaaggaatggcattgcagccgactgcgtgttttcaacatat

SEQ ID NO: 2522 - DNA, 1239 bp, Triticum aestivum
  source 1..1239: mol_type = genomic DNA
atgtcccgcctccgccactcctccgccacgccgatctccagcctccgcctcctccgccacatctcctcttccacctccacccccacccccacgtcgccaacctcatgctcctggtcaccccatgccgcctttggcgcggccacggagcgtgtccgtgccgggacactcaggccggaagacgcacacaccctgttcgacgaattgcttcggcaggccacaccggtccccgagcgctccctcaacggcttccttgccgccctcgcccgcgcgcccgcctccggcaactgcatcagagatggccccgcccttgcagtggctctcttcagccgtgtgtgcagagaggaagccggcccgcaggtggtggcgctcacagtttgcacctacaacatcctcatggactgctgctgccgtgcgcgtcgcccggagctagggcttgccttatttggccgcttcctcaggaagggcctcaagacagaccagaccggcgccagcaccttcctcaagtgcctctgctacgcaaaacggacggatgaggcagtggacgttttgcttcataggatgtccgagcttgggtgtgtgcctgatgccatctcatacaacactgttctgaagagcttatgcgacaatggcatgagccagcgggggctcgaactgctccagctggtggcgggaaaaggaggtggctgcttccctgatgtggtggcgtatagcacggtcatccatggcttttttcaggagggtgaagcagggaaggcatgcagtctattccatgaaatgatgcagcaagggattgtgcccagtgtggtgacatatagctcgatcattgatgcgttgtgcaaggccagagcaatggacagggcagagctagtccttcggcagatggttgctaatggtgctcaacccgatacagtgacatataattgcatgatcaatggatatgccacatctgggcggttgaaagagtctgctaaaatgttcagagaaatgaaaagccggggtcttatgccagatattgttacttgcaactccttcctgtcctccctttgcaagcatggaagaagcaaagaagctgcagaattttttgattccatgaccgccaagggccacaaaccggatatcgtctcataccgtattttgcttcatgggtatgctactgaaggatgctttgctgatatgattgacctctttaatgcaatggaaaggaatggcattgcagccgactgcgtgttttcaacatat

SEQ ID NO: 2523 - DNA, 1239 bp, Triticum aestivum; identical to SEQ ID NO: 2522
  source 1..1239: mol_type = genomic DNA

SEQ ID NO: 2524 - DNA, 1239 bp, Triticum aestivum; identical to SEQ ID NO: 2522
  source 1..1239: mol_type = genomic DNA

SEQ ID NO: 2525 - DNA, 1239 bp, Triticum aestivum; identical to SEQ ID NO: 2522
  source 1..1239: mol_type = genomic DNA

SEQ ID NO: 2526 - DNA, 1239 bp, Triticum aestivum; identical to SEQ ID NO: 2522
  source 1..1239: mol_type = genomic DNA

SEQ ID NO: 2527 - DNA, 1173 bp, Triticum aestivum
  source 1..1173: mol_type = genomic DNA
atgggacacgtcattaagttgggatttgcagcacaagctgtcgtcaatttcagccacctactcaaggccatctgtgcggagaagaagaccagctatgcaatggacatcgtactccgagtaatccccatgtttaactgtgtgccggatgtcttctcctacagcattcttttcaagggtctttgcaacgaaaggagaagccaagaggctcttgagctgattcacatcatggtacagcatggaggtagctgccaacctaatgtggtgtcctatagcaccgtaattgatggcttgttgaaagagggtgagatgaacaaggcttacagtctattttgtgaaatgttacagtggggaatttcgccgaatgttgtgacctgtaattcaattatctctggcatgtgcaagcttcatgcaatggacaaggctgaggaggttcttcaacagatgcttgatagaggaattctgccaaatagtaccacatataatggcctgatacatgggtattattcactaggacagtgcgaagaggtgggtcggattttcaaggaaatgtctagaaatggtgttcaaccaaatattgtaacttacaatatacagatggattatctttgcaagagcggaagatgcgcagaagctaggaagatttttgattctatggtcagtttgggccaaaaaccagatgttactacctacggcattctgcttcatgggtatgctatggaacgatcttttcatgatattcattgtctcattgatttgatggtcggaaatggtctgtcaccaaataactatatctacagcatactcatatctgcatgtgctaaagaaaaaatggttgatgaggcaatgcatatatttacaaaaatgcagcagcaaggatttaaccctgatgtagtgagctatggaatggtgatagacttgctttccagtattggccgaatggatgatgctatgtcccaattcaatcaaatgataaccgaagggttagctcctgatatcatagtttcaacccccttattagtggtttctgttcttgtggcaaatgggagaaggttcatgaactattttctgagatgttggatcgcagcatctgtcccgacagagtgttcttcaacactgatatggatcacctttgcaaaagtggaagggttatggaagcccaggatatcttcgacc

SEQ ID NO: 2528 - DNA, 1173 bp, Triticum aestivum; identical to SEQ ID NO: 2527
  source 1..1173: mol_type = genomic DNA

SEQ ID NO: 2529 - DNA, 1218 bp, Triticum aestivum
  source 1..1218: mol_type = genomic DNA
atgacggatgaagctatgctcatatttacggaaatgcgggaaaaaggagtaggtcccgatgcgttcacctattccactgtaatagccgcactttccagaatgggtaggttgaccgatgctatgggcaagttaagtcagatgattgccatgggagttcaaccggacacagctgtttatcactccctgattcagggttgttgtatacatggtgatttggttaaagccaaggagctggtttctgaaatgatgaacaaaggtattcctcgtcctagcattgcgttcttcagttcagtgataaactatttatgcaaagaaggcagggttatggatgcacatgatatctttgaccttgttatagacatgggtgagaggcctgatgtcattacatttaattcactgattgacggatattgcttagttgataagatggataaagcactcagagtgcttgattccatggtatcatttggcattgagcctaatgtggttacatataatacacttgttaatggctactgtacaaacggaaggatcgatgatggtttgaccctgtttagagaaatgccgcataagagaattaaacctgacactgtaacatatggcatcatactggatgggttgtttcgttctgggagcactgttgctgctaggaaaatgttccatgagatgacggaaagtggaataacagtgagtatttccacatacagtataatacttggaggtttttgtagaaataattgtgcagacgaagctatcaccctgttccagaaattaggaacaatgaatgtgaagtttgatattgcaatactcaataccatgattaatgcaatgtacaaggttgggagaagagaagaagctaaggatttgtttgctgcaatatcacccagtagcttggtgcccaatgaatctacttatgcagtaatgataaaaattcttctaaaagacggagcagtggaagatgctgacaatatgttttcatcaatggacaacagtggtatcgttcccagttcccgtcttataaatgatatcatcagaatgttgttggaaaaaggtgagatagccaaggctggaaattatttgtctaaagttgatgggaagagtatctcacttgaagcttcaactgcctcattgatgttgtctctcttttcaaggaaagggaaacatcaggaggatattaagttgctccctgcaaagtatcaattttttgatggatttggt

SEQ ID NO: 2530 - DNA, 1218 bp, Triticum aestivum
  source 1..1218: mol_type = genomic DNA
atgacggatgaagctatgctcatatttacggaaatgcgggaaaaaggagtaggtcccgatgcgttcacctattccactgtaatagccgcactttccagaatgggtaggttgaccgatgctatgggcaagttaagtcagatgattgccatgggagttcaaccggacacagctgtttatcactccctgattcagggttgttgtatacatggtgatttggttaaagccaaggagctggtttctgaaatgatgaacaaaggtattcctcgtcctagcattgcgttcttcagttcagtgataaactatttatgcaaagaaggcagggttatggatgcacatgatatctttgaccttgttatagacatgggtgagaggcctgatgtcattacatttaattcactgattgacggatattgcttagttgataagatggataaagcactcagagtgcttgattccatggtatcatttggcattgagcctaatgtggttacatataatacacttgttaatggctactgtacaaacggaaggatcgatgatggtttgaccctgtttagagaaatgccgcataagagaattaaacctgacactgtaacatatggcatcatactggatgggttgtttcgttctgggagcactgttgctgctaggaaaatgttccatgagatgacggaaagtggaataacagtgagtatttccacatacagtataatacttggaggtctttgtagaaataattgtgcagacgaagctatcaccctgttccagaaattaggaacaatgaatgtgaagtttgatattgcaatactcaataccatgattaatgcaatgtacaaggttgggagaagagaagaagctaaggatttgtttgctgcaatatcacccagtagcttggtgcccaatgaatctacttatgcagtaatgataaaaattcttctaaaagacagagcagtggaagatgctgacaatatgttttcatcaatggacaacagtggtatcgttcccagttcccgtcttataaatgatatcatcagaatgttgttggaaaaaggtgagatagccaaggctggaaattatttgtctaaagttgatgggaagagtatctcacttgaagcttcaactgcctcattgatgttgtctctcttttcaaggaaagggaaacatcaggaggatattaagttgctccctgcaaagtatcaattttttgatggatttggt

SEQ ID NO: 2531 - DNA, 1218 bp, Triticum aestivum; identical to SEQ ID NO: 2529
  source 1..1218: mol_type = genomic DNA

SEQ ID NO: 2532 - DNA, 1218 bp, Triticum aestivum; identical to SEQ ID NO: 2529
  source 1..1218: mol_type = genomic DNA

SEQ ID NO: 2533 - DNA, 1218 bp, Triticum aestivum; identical to SEQ ID NO: 2529
  source 1..1218: mol_type = genomic DNA

SEQ ID NO: 2534 - DNA, 1218 bp, Triticum aestivum; identical to SEQ ID NO: 2529
  source 1..1218: mol_type = genomic DNA

SEQ ID NO: 2535 - DNA, 1233 bp, Triticum aestivum
  source 1..1233: mol_type = genomic DNA
atgcctcgcttctcctccaccacgtcaatgtcgtcactccgcctccgcctccccctccgcctgcacgcccgccactcctcctccgcctctcaaccctcacacagccagggctgggatccccacgccgccttcgccgccgccacggagcgtgcgcgctctggcagcctcaccccggcggacgcacaccacctgttcgacgaattgctgcggcaggccaatcctgtccaggagcgccccctcaacaactttctcgccgccctcgcccgcgcgccggccctcacggtcgccctcttcagcctcatatccaaaggcgcccgccgacgggtggcgcagccaaatgtcttcacctatggcgtccttatggactgctgctgccgtgcacaccgcccggatctggcactagcgttcttcggccgtttcctcaggacgggcctggaggcagaccaagtcgtcttcaacaccctcctcaagggcctttgccatgcaaagcaggcagatgaggccgtgaacgtgcttcttcacaggatgcctgacctgggctgcactcccaatgtggtggcgtacaacaccgtcatccatggcttctttagggaaggccaagtaggcaaggcatgcgatatgttccatggaatggcacataagggcgttatgcctaatgtggtgacatataactcggttattgatgcactgtgcaaggccagggccatggacaaagcagagacggtccttagtcaaatggtaaatgatggtgtcggacctaataatgtcacatatgatagcctcatccatggatattcctctttgggtaatttgaaggaggcggttagggtattcaaagagatgagtcggaggtttacaccagatgtcgttacctgcacctcactcatggccttcctttgcaagaatggaaaaagcaaagaagctgcagaaatttttgattcaatggccaccaagggcctgaaacgtgacaccgtttcatatgctattctccttcatgggtatgccactgaaggatgcttggttgacatgattaatctcttcaattcaatggcaacagactgtattctacctaactgtcatatcttcaatatactgattaatgcatatgctaaatctgggaagcttgataaggctatgcttatcttcaatgaaatgcagaaacaaggagtgagtccagatttaaccagatggttgatatgggagtacgaccgaatgcaattgtttatcattccc

SEQ ID NO: 2536 - DNA, 1233 bp, Triticum aestivum
  source 1..1233: mol_type = genomic DNA
atgcctcgcttctcctccaccacgtcaatgtcgtcactccgcctccgcctccccctccgcctgcacgcccgccactcctcctccgcctctcaaccctcacacagccagggctgggatccccacgccgccttcgccgccgccacggagcgtgcgcgctctggcagcctcaccccggcggacgcacaccacctgttcgacgaattgctgcggcaggccaatcctgtccaggagcgccccctcaacaactttctcgccgccctcgcccgcgcgccggccctcacggtcgccctcttcagcctcatatccaaaggcgcccgccgacgggtggcgcagccaaatgtcttcacctatggcgtccttatggactgctgctgccgtgcacaccgcccggatctggcactagcgttcttcggccgtttcctcaggacgggcctggaggcagaccaagtcgtcttcaacaccctcctcaagggcctttgccatgcaaagcaggcagatgaggccgtgaacgtgcttcttcacaggatgcctgacctgggctgcactcccaatgtggtggcgtacaacaccgtcatccatggcttctttagggaaggccaagtaggcaaggcatgcgatatgttccatggaatggcacataagggcgttatgcctaatgtggtgacatataactcggttattgatgcactgtgcaaggccagggccatggacaaagcagagacggtccttagtcaaatggtaaatgatggtgtcggacctaataatgtcacatataatagcctcatccatggatattcctctttgggtaatttgaaggaggcggttagggtattcaaagagatgagtcggaggtttacaccagatgtcgttacctgcacctcactcatggccttcctttgcaagaatggaaaaagcaaagaagctgcagaaatttttgattcaatggccaccaagggcctgaaacgtgacaccgtttcatatgctattctccttcatgggtatgccactgaaggatgcttggttgacatgattaatctcttcaattcaatggcaacagactgtattctacctaactgtcatatcttcaatatactgattaatgcatatgctaaatctgggaagcttgataaggctatgcttatcttcaatgaaatgcagaaacaaggagtgagtccagatttaaccagatggttgatatgggagtacgaccgaatgcaattgtttatcattccc

SEQ ID NO: 2537 - DNA, 1227 bp, Triticum aestivum
  source 1..1227: mol_type = genomic DNA
atgccatgccagcatccgccgtggcccgcgccggcgcgcccgaccacctgtgaattgtcacgactcacctccgccgccgctcgcgctgagctgattcccgcatccgccgccgccgcctctcctcttccacctcgctgccctcgagctgctgtgctcctggcgacgccgccaagcctccactccaccacgcccatgtcccgcatccgccttcgccgcagccgcctcttctcctcctgcgccaccaccccgccgcccgcaggctcctggtctccccacgccgccttcgccgcggccacagagcgcgccctcgccgggaagctcagcggggaggacgcacaccacctgttcgatgaattgctgcggcaggccaccccggtccccgagcgctccctcaacggattccttactgccctcgcccgtgcaccggactcctccactttcagaaatggccctgccctcgcccgtgcaccggactcctccactttcagaaatggccctgccctcgccatcgccctcttcaaccgcctgtgccgagaagaagccggctcgcgggtggcgtggcccacggtctgcacctacaacatcctcatggactgccgctgccgcacgcgtcgcccggatctagggcctgccttccttgggcgcctcctcaggacgggcctgaagacaaaccagatcgtcgccaacaccctcctcaagtgcctctgctacgccaaacggacggatgaggctgtcaatgtattgcttcacaagatgtccgagctcggctgtgtgcctgatgccatctcatacaacacagttcttaagagattatgtgaagatagcagaagccagggagcactcgacctgctccggacggtggcaaaagaaggaggtgttggctctctcgatgtggtatcccatggcactgtcatccatggcttctttaaggaaggcgaaacaggcaaggcatgcaatctattccatgaaatgacacaacaagggattgtgcccaatgtggtgacatataacttgattattgatgcgttgtgcaaggccagagcaatggacaaggcagagctgatccttcggcagatggttgataacggtgttcgacccgatacagttacttgcagctcgatcatgtcttccctttgcaagcatggaagaagcaaagaagctgcagaaatttttgactccatgactgccaaaggcctcaaagctgatgttttctcatattctgtttca

SEQ ID NO: 2538 - DNA, 1227 bp, Triticum aestivum; identical to SEQ ID NO: 2537
  source 1..1227: mol_type = genomic DNA

SEQ ID NO: 2539 - DNA, 672 bp, Triticum aestivum
  source 1..672: mol_type = genomic DNA
atgccatgccagcatccgccgtggcccgcgccggcgcgcccgaccacctgtgaattgtcacgactcacctccgccgccgctcgcgctgagctgattcccgcatccgccgccgccgcctctcctctttcacctcgccgccctcgagctgctgtgctcctggcgacgccgccaagtctccactccaccacgcccatgtcccgcatccgccttcgccgcagccgcctcttctcctcctgcgccaccaccccgccgcccgcaggctcctggtctccccacgccgccttcgccgcggccacagagcgcgccctcgccgggaagctcagcggggaggacgcacaccacctgttcgatgaattgctgcggcaggccaccccggtccccgagcgccccctcaacggattccttactgccctcgcccgtgcaccggactcctccactttcagaaatggccctgccctcgcccgtgcaccggactcctccactttcagaaatggccctgccctcgccatcgccctcttcaaccgcctgtgccgagaagaagccggctcgcgggtggcgtggcccacggtctgcacctacaacatcctcatggactgctgctgccgcacgcgtcgcccggatctagggcctgccttccttgggcgcctcctcaggacgggcctgaagacaaac

SEQ ID NO: 2540 - DNA, 1227 bp, Triticum aestivum; identical to SEQ ID NO: 2537
  source 1..1227: mol_type = genomic DNA

SEQ ID NO: 2541 - DNA, 1101 bp, Triticum aestivum
  source 1..1101: mol_type = genomic DNA
atgccagtgatgcctcgcttctactccactacgcccatgccccgcctcctccgccgcctctcctccacctccacctccacctcggggccctcacgctgctgggatcccagcgccgccctcgccgcggccacagagcgggtccgcgccgggacgctcagcccggcagacgcacgccacctgttcgacgaattgctgcagcggccaaccccggtccctggtcaagccctgaacggcttcctcgccgcccttgcccgcgctccggcctccgccgcctgcggagacagccccgccctcgccgtgtctctcttcaaccgcctgtgccgagaagccagcccgcatgcgtcgcctcttacagtccacacctacagcatcctcatggactgctgctgccgcgcgcgtcgccctgacctggggcttgccttcttcggccgcctcctcaggacgggcctgaggacagacggcgtcgacgcatacgccctcatcaagtgcttctgcctcgcaaaacggacagacgaggctgtcagcgtgctgctccataggttgtctgaactcggctgtgtgcctgatgccttatcatactccgtcgttctgaaggtcttatgcgatgatagcaggagccagcgagcgctcgacctgctccggatgatgtcgaaagaaggaggtgtctgcgcccccaacgtggtgccatatagcacggtcatccacggcttctgcaaggaaggcaaagtaagcaaggcatgcgatctgttcaacaaaatggggcagcaaggagttaagcctaatgtggtgacatatacctcgataattgatgcgctgtgcaaggccagagcaatggacaaggcagagtcattccttcggcatatggtcgataatgatgttcgacccaacaacgtgacatataagtgtatcatccagggatattcctctttgggcttgtggaatgaggcagtaaaaatattcagagaaatgacaagccggggtcttatgctagatgatgttactcgcaactcattcgtggcctccctttgcaaccatggaagaagcaaggaagctgcggagattgcccatcagatgattgaaagtgaaactacagtgagcaac

SEQ ID NO: 2542 - DNA, 1101 bp, Triticum aestivum
  source 1..1101: mol_type = genomic DNA
atgccagtgatgcctcgcttctactccactacgcccatgccccgcctcctccgccgcctctcctccacctccacctccacctcggggccctcacgctgctgggatcccagcgccgccctcgccgcggccacagagcgggtccgcgccgggacgctcagcccggcagacgcacgccacctgttcgacgaattgctgcagcggccaaccccggtccctggtcaagccctgaacggcttcctcgccgcccttgcccgcgctccggcctccgccgcctgcggagacagccccgccctcgccgtgtctctcttcaaccgcctgtgccgagaagccagcccgcatgcgtcgcctcttacagtccacacctacagcatcctcatggactgctgctgccgcgcgcgtcgccctgacctggggcttgccttcttcggccggctcctcaggacgggcctgaggacagacggcgtcgacgcatacgccctcatcaagtgcttctgcctcgcaaaacggacagacgaggctgtcagcgtgctgctccataggttgtctgaactcggctgtgtgcctgatgccttatcatactccgtcgttctgaaggtcttatgcgatgatagcaggagccagcgagcgctcgacctgctccggatgatgtcgaaagaaggaggtgtctgcgcccccaacgtggtgccatatagcacggtcatccacggcttctgcaaggaaggcaaagtaagcaaggcatgcgatctgttcaacaaaatggggcagcaaggagttaagcctaatgtggtgacatatacctcgataattgatgcgctgtgcaaggccagagcaatggacaaggcagagtcattccttcggcatatggtcgataatgatgttcgacccaacaacgtgacatataagtgtatcatccagggatattcctctttgggcttgtggaatgaggcagtaaaaatattcagagaaatgacaagccggggtcttatgctagatgatgttactcgcaactcattcgtggcctccctttgcaaccatggaagaagcaaggaagctgcggagattgcccatcagatgattgaaagtgaaactacagtgagcaac

SEQ ID NO: 2543 - DNA, 1101 bp, Triticum aestivum; identical to SEQ ID NO: 2541
  source 1..1101: mol_type = genomic DNA

SEQ ID NO: 2544 - DNA, 1101 bp, Triticum aestivum; identical to SEQ ID NO: 2542
  source 1..1101: mol_type = genomic DNA

SEQ ID NO: 2545 - DNA, 1101 bp, Triticum aestivum; identical to SEQ ID NO: 2541
  source 1..1101: mol_type = genomic DNA

SEQ ID NO: 2546 - DNA, 1101 bp, Triticum aestivum; identical to SEQ ID NO: 2541
  source 1..1101: mol_type = genomic DNA

SEQ ID NO: 2547 - DNA, 1110 bp, Triticum aestivum
  source 1..1110: mol_type = genomic DNA
atgccagccgcccgcctgtcctccttcaaggctccttcacgagagcgccgacctcccctcgccgccttggctgccgccacggagcgcgtccgcgccggaacgctaagtcggcaggacgcgcaccacctgttcgacgaattgctgagccaagccgcgacagtcccagtacgcaagctgaacaactttcttgccgccctcgcccgtgcaccgccctcaactgcctgcagcgatggtccgggccttgccatcgccctcttcaaccgcatgtcccgaggcgctggtgcacgggtggtgtcgcccacgctctgtacctattccatcctcattgactgctgctgccgtgcacgccgcccggacttggtggttgccttcttcggccgcctcctcaggttggggctgctcttggaggtcatctccttcaacaatctcctcaaggggctttgccaggccaagcgctcaaatgaggctttggacatgctgctccaccggacacctgaactacactgtgcgcctgatgtcttctcgtacaacatagtaatcaacggctgcttgaaagaaggtgaagtagacaaagcgtgcaatctcttccatgagatgccccaactgggagttcaacctgatgtggtgacctacacctcaatcatggacgcactaagcaagtccggagcaatggacaaggcagaagtgctccttcggcaaatggttgatcaaggaattgaacccaatatcaagacatatagctatctgatccatggatattctacttttggtcagtggaaggaggcacttagggtattcaaagaaatggcaagtcttggtgttgtaccagacgttgtcacgttgacctcattaatcgattccctttgcaagcacagaaggacaaaggaagctagagaaatttttgactctatggctgcaaagggcctgaaacctaatatcgtctcctactctactatgcttaatgggtatgtcaaagaaggatccttcgaggatatgactgatctcttcaattcgatggtacggaatggtatcgtacctaaccaccatattttcaacatactgatcaatgcatatgctaaacgtggaggagtgaagtgcactgtaggtcct

SEQ ID NO: 2548 - DNA, 1068 bp, Triticum aestivum
  source 1..1068: mol_type = genomic DNA
atgtctcgcctccgtctccgcctcccccgcggcagctcctcccccaccacactgataccccgcctccggctcctccgccgctgctccacctccacctccacgtcgtcgccctcacgctcctggtctccccgagacgcctttgccgcggccacggagcgtgttcgcgccgggacgctcagcctggaagacgctcacaaactgttcgacgaattgctcggtcaggccaccccggtcccggagcgctccctgaacggcttccttgccgccctcgcccgcgcgcccgcctccggtgcctgcatcagagatggccccgcccttgcagtggctctcttcaaccgtgtgtgcagagaggaagccggcgcgcaggtggcggcgctcacagtttgcacctacaacatcctcatggactgctgctgccgtgcgcgtcgtccggacctagggcttgccttatttggctgcttcctcaggaagggcctgaagacagaccagaccggcgccaacaccttcctcaagtgcctctgctacgcgaaacggacggatgaggctgtgaacgtgctcctccacaggatgtccgagctcggctgtgtgcctaatgccgtttcgtacaacactgttctgaagggcttatgcgacaatagcatgagtcagcgggcgctcgacctgctccagatggtggcgggaaaaggaggtggctgcttccctgatgtggtggcgtatagcacggtcatccatggcttttttaaggagggtgaaacagggaaggcatgcagtctattccatgaaatgatgcagcaagggattgtgcccagtgtggtgacatataactcgattattgatgcgttgtgcaaggtcagagaagtggacaaggcagagctagtccttcgtcagatggttgctaaaggtgctcaacccgatacagtgacatataattgcatgatcaatggatatgccacatctgggcggttgaaagccggggtcttacaccaaatgttgttacttgcaactcgttcctggcctccctttgcaagcaccgaagtagcaaagaagctgcagaattttttgattcca

SEQ ID NO: 2549 - DNA, 993 bp, Triticum aestivum
  source 1..993: mol_type = genomic DNA
atggcgccaaatcattttgtctacaacatactcatatctgcatatggtcaagaagaaacggttggtgaggtaatgcatatatttacaaaaatgcggcaggaaggattgaaccctgatgttgcgaactatggagcggtaataaacttgctttctagtatcggccgaatggatgatgctaagtcccaatacaatcaaatgataactgaaggattactccctggtatcattgttttcaccccccttattagtggtttctgttcttgtggcaaatgggagaaggttcctgaactattttctgagatgttggatcgcggcatctgtcccaatacagtgttcttcaacgcaattatggatcgcctttgcaaaaatggaagggttatggaagcccaggatctcttcgacctgatggtacacatgggtgtgaagcctgatgtgtgtacttataacacactgataggtggatacttgttcgttggtaagatggatgaagtaaggaagttacttgacaatatggtctcaattggcttgaaaccagatgttatcacatatagcatactgattgatggttactctaagaatggaaggatagatgatgcattggttgtttccagggaaatgttggccgggaaggttaagccttgtgttatcacttttaatattatgattggtgcattgcttaaatgtggcaggaaggcagaaaccaaagatttgtttgacggtatctgggccaacggattagtgcccgacgttattacatatagcttaatgatacaaaaacttattgaagaaggttctctacaagagtctgatgatctattcctttctatggagaagaatggatgtgttgccgactcccatatgctaaatgctatagttagaagcttacttcggaaaggggaggtgcccagggctgggacttatctatctaaaattgatgagagggtgttcacccttgaagcttccacttgcttcaggggggaaaggccaagaata

SEQ ID NO: 2550 - DNA, 1233 bp, Triticum aestivum
  source 1..1233: mol_type = genomic DNA
atgtgggccagccacctgttggacccacatgtcatagacacaaaggtaggtgccttaatgcacggaagcatcgtcccctctgcgcgcgcctcccgacagctcacgcgccagagtgtcccgcatccgccgccggtcaccctcctcctcctcctcctcctctacctagccgacgtccggcttccgcctccgctgctcctccacttcatcacgctgatgtccagcatccacctccgccactgctccactatgcccatgtcccacgtctgcctccgccgccgcctttcctcatcctcctcctccttctccaactgcacctcgccgccctcaccaccctggtctccccacgccgcatttgccgcggccacagagcgtgtacgagccaggacgctcagcccggaagacgcacaccacctgttcgacgtattgtttcagcaggccactccggtccccgagcgctcccttgatggattccttgcagcactcagccgcgctacgccctctgaagcctgcggagacggccccgccctcgccctcaccctcttcaaccgtgtctgccgagaagaagccgggatgcaggtggtgccgcccaccatcttcacctacggcatcctcatgaactgctgctgccgcgaacgtcgtccggacctagggcttgccttctttgggcgcatcctcaaggctggcctgaagacaaacctgatcaccgccaacaccgtcctcaagtgcctctactgcgcaaaacataccgacgaggctgtcgatatgctgcttcataggatgtccgaccttggctgtgtgcctgatgacttctcatacaacacagttctccacggcttctttaaggaaggaaaaataggcaaggcctgcaatctattccatgaaatgatgctgcaagggtttgtccctgatgtggtgacatataacttgattattgaagcattgtgcaaggcccgagcaatggacaatgcagagttgttcctacggcagatggttgataacgttgttccaccggataaagtgacatatactagcatgatccatggatattccactttgggccggtggaaagaggcgactaaaatgttcagagagatgacaagcaggggtcttatacctaatattgtcacatggagctcgttcatggactccctttgcaagcatgggaaaagcaaagaagctgcagaaattttcttttccatggctggaaagggccataagcctaatatcgtctcc

SEQ ID NO: 2551 - DNA, 1014 bp, Triticum aestivum
  source 1..1014: mol_type = genomic DNA
atgtccagcatccacctccgccactgctccactatgcccatgtcccacgtctgcctccgccgccgcctttcctcatcctcctcctcctccaactgcacctcgccgccctcaccaccctggtctccccacgccgcatttcccgcggccacagagcgtgtacgagccaggacgctcagcccggaagacgcacaccacctgttcgacgtattgtttcagcaggccactccggtccccgagcgctcccttgatggattccttgcagcactcagccgcgctacgccctctgaagcctgcggagacggccccgccctcgccctcaccctcttcaaccgtgtctatcgagaagaagccgggatgcaggtggtgccgcccaccatcttcacctacggcatcctcatgaactgctgctgccgcgaacgtccggacctagggcttgccttctttgggcgcatcctcaaggctggcctgaagacaaacctgatcgccgccaacaccgtcctcaagtgcctctactgcgcaaaacataccgacgaggctgtcgatatgctgcttcataggatgtccgaccttggctgtgtgcctgatgacttctcatacaacacagttctccacggcttctttaaggaaggaaaaataggcaaggcccgcaatctattccatgaaatgatgctgcaagggtttgtccctgatgtggtgacatataacttgattattgaagcattgtgcaaggcccgagcaatggacaatgcagagttgttcctacggcagatggttgataacgttgttccaccagataaagtgacatatactagcatgatccatggatattccactttgggccggtggaaagaggcgactaaaatgttcagagagatgacaagcaggggtcttatacctaatattgtcacatggagctcgttcatggactccctttgcaagcatgggaaaagcaaagaagctgcagaaattttcttttccatggctggaaagggccataagcctaatatcgtctcc

SEQ ID NO: 2552 - DNA, 1014 bp, Triticum aestivum; identical to SEQ ID NO: 2551
  source 1..1014: mol_type = genomic DNA

SEQ ID NO: 2553 - DNA, 1020 bp, Triticum aestivum
  source 1..1020: mol_type = genomic DNA
atgtccagcatccacctccgccactgctccactatgcccatgtcccacgtctgcctccgccgccgcctttcctcatcctcctcctccttctccaactgcacctcgccgccctcaccaccctggtctccccacgccgcatttgccgcggccacagagcgtgtacgagccaggacgctcagcccggaagacgcacaccacctgttcgacgtattgtttcagcaggccactccggtccccgagcgctcccttgatggattccttgcagcactcagccgcgctacgccctctgaagcctgcggagacggccccgccctcgccctcaccctcttcaaccgtgtctgccgagaagaagccgggatgcaggtggtgccgcccaccatcttcacctacggcatcctcatgaactgctgctgccgcgaacgtcgtccggacctagggcttgccttctttgggcgcatcctcaaggctggcctgaagacaaacctgatcaccgccaacaccgtcctcaagtgcctctactgcgcaaaacataccgacgaggctgtcgatatgctgcttcataggatgtccgaccttggctgtgtgcctgatgacttctcatacaacacagttctccacggcttctttaaggaaggaaaaataggcaaggcctgcaatctattccatgaaatgatgctgcaagggtttgtccctgatgtggtgacatataacttgattattgaagcattgtgcaaggcccgagcaatggacaatgcagagttgttcctacggcagatggttgataacgttgttccaccggataaagtgacatatactagcatgatccatggatattccactttgggccggtggaaagaggcgactaaaatgttcagagagatgacaagcaggggtcttatacctaatattgtcacatggagctcgttcatggactccctttgcaagcatgggaaaagcaaagaagctgcagaaattttcttttccatggctggaaagggccataagcctaatatcgtctcc

SEQ ID NO: 2554 - DNA, 1014 bp, Triticum aestivum; identical to SEQ ID NO: 2551
  source 1..1014: mol_type = genomic DNA

SEQ ID NO: 2555 - DNA, 1176 bp, Triticum aestivum
  source 1..1176: mol_type = genomic DNA
atgcacggaagcatcgtcccctctgcgcgcgcctcccgacagctcacgcgccagagtgtcccgcatccgccgccggtcaccctcctcctcctcctcctcctctacctagccgacgtccggcttccgcctccgctgctcctccacttcatcacgctgatgtccagcatccacctccgccactgctccactatgcccatgtcccacgtctgcctccgccgccgcctttcctcatcctcctcctccttctccaactgcacctcgccgccctcaccaccctggtctccccacgccgcatttgccgcggccacagagcgtgtacgagccaggacgctcagcccggaagacgcacaccacctgttcgacgtattgtttcagcaggccactccggtccccgagcgctcccttgatggattccttgcagcactcagccgcgctacgccctctgaagcctgcggagacggccccgccctcgccctcaccctcttcaaccgtgtctgccgagaagaagccgggatgcaggtggtgccgcccaccatcttcacctacggcatcctcatgaactgctgctgccgcgaacgtcgtccggacctagggcttgccttctttgggcgcatcctcaaggctggcctgaagacaaacctgatcaccgccaacaccgtcctcaagtgcctctactgcgcaaaacataccgacgaggctgtcgatatgctgcttcataggatgtccgaccttggctgtgtgcctgatgacttctcatacaacacagttctccacggcttctttaaggaaggaaaaataggcaaggcctgcaatctattccatgaaatgatgctgcaagggtttgtccctgatgtggtgacatataacttgattattgaagcattgtgcaaggcccgagcaatggacaatgcagagttgttcctacggcagatggttgataacgttgttccaccggataaagtgacatatactagcatgatccatggatattccactttgggccggtggaaagaggcgactaaaatgttcagagagatgacaagcaggggtcttatacctaatattgtcacatggagctcgttcatggactccctttgcaagcatgggaaaagcaaagaagctgcagaaattttcttttccatggctggaaagggccataagcctaatatcgtctcc

SEQ ID NO: 2556 - DNA, 663 bp, Triticum aestivum
  source 1..663: mol_type = genomic DNA
atgcaggtggtgccgcccaccatcttcacctacggcatcctcatgaactgctgctgccgcgaacgtcgtccggacctagggcttgccttctttgggcgcatcctcaaggctggcctgaagacaaacctgatcaccgccaacaccgtcctcaagtgcctctactgcgcaaaacataccgacgaggctgtcgatatgctgcttcataggatgtccgaccttggctgtgtgcctgatgacttctcatacaacacagttctccacggcttctttaaggaaggaaaaataggcaaggcctgcaatctattccatgaaatgatgctgcaagggtttgtccctgatgtggtgacatataacttgattattgaagcattgtgcaaggcccgagcaatggacaatgcagagttgttcctacggcagatggttgataacgttgttccaccggataaagtgacatatactagcatgatccatggatattccactttgggccggtggaaagaggcgactaaaatgttcagagagatgacaagcaggggtcttatacctaatattgtcacatggagctcgttcatggactccctttgcaagcatgggaaaagcaaagaagctgcagaaattttcttttccatggctggaaagggccataagcctaatatcgtctcc

SEQ ID NO: 2557 - DNA, 1221 bp, Triticum aestivum
  source 1..1221: mol_type = genomic DNA
atggctatgaagggcctgaaacctgacaacgtttcatatgctattctccttcatgggtatgccaccgaaggatgcttagttgatatgattaatctcttcaattcaatggaaagaaactgtattctacctgactgttgtatcttcaacatactgattaatgcatatgctaaatctgggaagcttgataaggctatgcttatcttcaatgaaatgcagaaacaaggagtgagtccagatgcagtcacatatttacccgtaatagatgcattttgcaaaaagggtaggttggacgatgctatgattatgtttaatcagatgattgatacgggagtacgaccagacacagctgtttatacttccctaatccaaggtttttgtacacacggcgatttggtgaaagcaaaggaattggttactgaaatgatgaacaaaggtatacctcctcctgatattaagttcttccattcaatcatgcagaacctatgcacagaaggaagggtaatagaagcacgggatatccttggcttgatagcacacataggtatgaggcctaatgtttgcacatttaatatactgattggtggatactgcctagtccgcaagatggaggatgcctcaaaaatatttgatgatatgatgtcatatggtttagaaccttctaatattacttatggtatacttattaatggctattgcaaaaacttaaggattgacgatgggctgattctgttcaaagaaatgttgcgcaagggagttaaacctacaacttttaattataacgtcatactggatgggttatttctggctggacgaactgttgctgcaaaggaaaagtttcatgagatggctgaatctggagcagatgtgtgcattgatacatactgtatagttcaccgcagccagcacaagaagaggcatggccggaatgaggctcggccaccgggaggacgccggacagccggatgcacgagggcccatagcaccaccacggccagtccaagaggaggcctggccgggacgaggtcctgccgtcgggaggacgccggacagccaggccacgggaatgggtggccaggcgaggtggagcgcatgggagggtgggaggaggaggatgcgtcgcaccgggcagtgccggcgacgatggcaaggaggagccgcggaggcgatcccagatccgccaccaggaggggtcgcggggaggagcaccgccatgacgaccac

SEQ ID NO: 2558 - DNA, 1221 bp, Triticum aestivum; identical to SEQ ID NO: 2557
  source 1..1221: mol_type = genomic DNA

SEQ ID NO: 2559 - DNA, 1221 bp, Triticum aestivum; identical to SEQ ID NO: 2557
  source 1..1221: mol_type = genomic DNA

SEQ ID NO: 2560 - DNA, 1221 bp, Triticum aestivum; identical to SEQ ID NO: 2557
  source 1..1221: mol_type = genomic DNA

SEQ ID NO: 2561 - DNA, 1221 bp, Triticum aestivum
  source 1..1221: mol_type = genomic DNA
atggctatgaagggcctgaaacctgacaacgtttcatatgctattctccttcatgggtatgccaccgaaggatgcttagttgatatgattaatctcttcaattcaatggaaagaaactgtattctacctgactgttgtatcttcaacatactgattaatgcatatgctaaatctgggaagcttgataaggctatgcttatcttcaatgaaatgcagaaacaaggagtgagtccagatgcagtcacatatttacccataatagatgcattttgcaaaaagggtaggttggacgatgctatgattatgtttaatcagatgattgatacgggagtacgaccagacacagctgtttatacttccctaatccaaggtttttgtacacacggcgatttggtgaaagcaaaggaattggttactgaaatgatgaacaaaggtatacctcctcctgatattaagttcttccattcaatcatgcagaacctatgcacagaaggaagggtaatagaagcacgggatatccttggcttgatagcacacataggtatgaggcctaatgtttgcacatttaatatactgattggtggatactgcctagtccgcaagatggaggatgcctcaaaaatatttgatgatatgatgtcatatggtttagaaccttctaatattacttatggtatacttattaatggctattgcaaaaacttaaggattgacgatgggctgattctgttcaaagaaatgttgcgcaagggagttaaacctacaacttttaattataacgtcatactggatgggttatttctggctggacgaactgttgctgcaaaggaaaagtttcatgagatggctgaatctggagcagatgtgtgcattgatacatactgtatagttcaccgcagccagcacaagaagaggcatggccggaatgaggctcggccaccgggaggacgccggacagccggatgcacgagggcccatagcaccaccacggccagtccaagaggaggcctggccgggacgaggtcctgccgtcgggaggacgccggacagccaggccacgggaatgggtggccaggcgaggtggagcgcatgggagggtgggaggaggaggatgcgtcgcaccgggcagtgccggcgacgatggcaaggaggagccgcggaggcgatcccagatccgccaccaggaggggtcgcggggaggagcaccgccatgacgaccac

SEQ ID NO: 2562 - DNA, 1215 bp, Triticum aestivum
  source 1..1215: mol_type = genomic DNA
atggctatgaagggcctgaaacctgacaacgtttcatatgctattctccttcatgggtatgccaccgaaggatgcttagttgatatgattaatctcttcaattcaatggaaagaaactgtattctacctgactgttgtatcttcaacatactgattaatgcatatgctaaatctgggaagcttgataaggctatgcttatcttcaatgaaatgcagaaacaaggagtgagtccagatgcagtcacatatttacccataatagatgcattttgcaaaaagggtaggttggacgatgctatgattatgtttaatcagatgattgatacgggagtacgaccagacacagctgtttatacttccctaatccaaggtttttgtacacacggcgatttggtgaaagcaaaggaattggttactgaaatgatgaacaaaggtatacctcctcctgatattaagttcttccattcaatcatgcagaacctatgcacagaaggaagggtaatagaagcacgggatatccttggcttgatagcacacataggtatgaggcctaatgtttgcacatttaatatactgattggtggatactgcctagtccgcaagatggaggatgcctcaaaaatatttgatgatatgatgtcatatggtttagaaccttctaatattacttatggtatacttattaatggctattgcaaaaacttaaggattgacgatgggctgattctgttcaaagaaatgttgcgcaagggagttaaacctacaacttttaattataacgtcatactggatgggttatttctggctggacgaactgttgctgcaaaggaaaagtttcatgagatggctgaatctggagcagatgtgtgcattgatacatactgtatagttcaccgcagccagcacaagaagaggcatggccggaatgaggctcggccaccgggaggacgccggacagccggatgcacgagggcccatagcaccaccacggccagtccaagaggaggcctggccgggacgaggtcctgccgtcgggaggacgccggacagccaggccacgggaatgggtggccaggcgaggtggagcgcatgggagggtgggaggaggaggatgcgtcgcaccgggcagtgccggcgacgatggcaaggaggagccgcggaggcgatcccagatccgccaccaggaggggtcgcggggaggagcaccgccatgac

SEQ ID NO: 2563 - DNA, 1173 bp, Triticum aestivum
  source 1..1173: mol_type = genomic DNA
atgtacatttcaagtttggacctgaaatttttaggagttgtagccacattccttgcgaacattcacattttattccgaaatttttggaaatatttaagatatatttttaaacatggagcaccgggagtatataaggatggaagtaccagatattctcccggccgtgcccatcccatgcctcgcctctaccccaccacgcccatgctccgcctcctccccctgccttcacgccgctgggatccccgcggggcctttgcctcagccacggagcgcgcccgcgccgggacgctcagccctgaagacgcacaccacctgttcgacgaattgctactacaggccaaccccgtccccgagcgctccctcaacggcttccttgccgcgctcgcccgcgctccgtcctccgctgctctcagagatggaccctcccttgctctcggcctcttcaaccgcgtctgccgagaagaagcaggaccgcgggtggtgccgcccacagtctgcacatacaacatcctcatggacagctgctgccgtgcacgccgtccggacctaggccttgccttcttcgaccgcttcctcaggatgggcctcaaggcagaccagatcgtcgccaacaacctcctcaagtgcctctgccacgcaagacggacacatgaggctatcaacgtgctgcttcataggatgtctgagttcggatgtgtgcctaatgtcatctcatactctatagtacttaagagcttatgtgacgatagcaggagccagcaagcgttcgacctgctccagatggtgaggaaagaaggaggtgccggctccctcaatgtggtggcgtatagcacagtgattcatgctttctttaaggaaggggaagcaagcaaggcatgtgatctattccatgagatgatgcagcaagggattgtgcctaatgtggtgacatatagctcgattattgatgccttgtgcaaggtcagggcaatggacaaggcaaagttggtccttcagcagatggttgataatggtgttcgaccaaatatgtatacatggaactcattcatgtactccctttgcaagaatggaagaagcaaagaagctgcagaattttttgactccatgacccccaagggccttaaacctaatatcgtcgtgtactctactcttcttcacgggtatgctagcgaa

SEQ ID NO: 2564 - DNA, 1173 bp, Triticum aestivum; identical to SEQ ID NO: 2563
  source 1..1173: mol_type = genomic DNA

SEQ ID NO: 2565 - DNA, 1173 bp, Triticum aestivum; identical to SEQ ID NO: 2563
  source 1..1173: mol_type = genomic DNA

SEQ ID NO: 2566 - DNA, 1173 bp, Triticum aestivum; identical to SEQ ID NO: 2563
  source 1..1173: mol_type = genomic DNA

SEQ ID NO: 2567 - DNA, 1173 bp, Triticum aestivum; identical to SEQ ID NO: 2563
  source 1..1173: mol_type = genomic DNA

SEQ ID NO: 2568 - DNA, 1173 bp, Triticum aestivum; identical to SEQ ID NO: 2563
  source 1..1173: mol_type = genomic DNA

SEQ ID NO: 2569 - DNA, 1173 bp, Triticum aestivum
  source 1..1173: mol_type = genomic DNA
atgtacatttcgagtttggacctgaaatttttaggagttgtagccacattccttgcgaacattcacattttattccgaaatttttggaaatatttaagatatgtttttaaacatggagcaccgggagtatataaggatggaagtaccagatattctcccggccgtgcccatcccatgcctcgcctctaccccaccacgcccatgctccgcctcctccccctgccttcacgccgctgggatccccgcggggcctttgcctcagccacggagcgcgtccgcgccgggacgctcagccctgaagacgcacaccacctgttcgacgaattgctactacaggccaaccccgtccccgagcgctccctcaacggcttccttgccgcgctcgcccgcgctccgtcctccgctgctctcagagatggaccctcccttgctctcggcctcttcaaccgcgtctgccaagaagaagcaggaccgcgggtggtgccgcccacagtctgcacatacaacatcctcatggacagctgctgccgtgcacgccgtccggacctaggccttgccttcttcggccgcttcctcaggatgggcctcaaggcagaccagatcgtcgccaacaacctcctcaagtgcctctgccacgcaagacggacagatgaggctatcaacgtgctgcttcataggatgtctgagttcggatgtgtgcctaatgtcatctcatactctatagtacttaagagcttatgtgacgatagcaggagccagcaagcgttcgacctgctccagatggtgaggaaagaaggaggtgccggctccctcaatgtggtggcatatagcacagtgattcatgctttctttaaggaaggggaagcaagcaaggcatgtgatctattccatgagatgatgcagcaagggattgtgcctaatgtggtgacatatagctcgattattgatgccttgtgcaaggtcagggcaatggacaaggcaaagttggtccttcagcagatggttgataatggtgttcgaccaaatatgtatacatggaactcattcatgtactccctttgcaagaatggaagaagcaaagaagctgcagaattttttgactccatgacctccaagggccttaaacctaatatcgtcgtgtactctactcttcttcacgggtatgctagcgaa

SEQ ID NO: 2570 - DNA, 993 bp, Triticum aestivum
  source 1..993: mol_type = genomic DNA
atggcgccaaatcattttgtctacaacatactcatatctgcatatgctcaagaagaaacggttggtgaggtaatgcatatatttacaaaaatgcggcaggaaggattgaaccctgatgttgcgaactatggagcggtaataaacttgctttctagtattggccgaatggatgatgctatgtcccaatacaatcaaatgataactgaaggattactccctggtatcattgttttcaccccccttattagtggtttctgttcttgtggcaaatgggagaaggttcctgaactattttctgagatgttggatcgcggcatctgtcccaacacagtgttcttcaacacaattatggatcgcctttgcaaaaatggaagggttatggaagcccaggatctcttcgacctgatggtacacatgggtgtgaagcctgatgtgtgtacttataacacactgataggtggatacttgttcgttggtaagatggatgaagtaaggaagttacttgacaatatggtctcaattggcttgaaaccagatgttatcacatatagcatactgattgatggttactctaagaatggaaggatagatgatgcattggttttttccagggaaatgttggccgggaaggttaagccttgtgttatcacttttaatattatgattggtgcattgcttaaatgtggcaggaaggcagaaaccaaagatttgtttgatggtatctgggccaacggattagtgcccgacgttattacatatagcttaatgatacaaaaacttattgaagaaggttctctacaagagtctgatgatctattcctttctatggagaagaatggatgtgttgccgactcccatatgctaaatgctatagttagaagcttacttcggaaaggggaggtgcccagggctgggacttatctatctaaaattgatgagagggtgttcacccttgaagcttccacttgcttcaggggggaaaggccaagaata

SEQ ID NO: 2571 - DNA, 993 bp, Triticum aestivum; identical to SEQ ID NO: 2570
  source 1..993: mol_type = genomic DNA

SEQ ID NO: 2572 - DNA, 993 bp, Triticum aestivum; identical to SEQ ID NO: 2570
  source 1..993: mol_type = genomic DNA

SEQ ID NO: 2573 - DNA, 1089 bp, Triticum aestivum
  source 1..1089: mol_type = genomic DNA
atgtctgaactcggctgtgtgcctgatgccttgtcgtactccgtcgttctgaaggtcttgtgtgacgatagcaggagccaacgagcgctcgacctgctccagatgatgtcgaaagaaggaggtgggtgcgccccgaacgtggtggcatatagcacgttcatccatggcttctgtaaggaaggcaaagtaagccaggcatgcgatctgttcgatgaaatggtgcagcaaggagttaagcctaatgtggtgacatacacctcagtaattgatgcgctgtgcaaggcaagagcaatggacaaggcagagtcgttccttcggcatatggtcaatcatggtgttcgacccaacaacgtgacctataagtatatgatccagggttattccactttgggctggttgaaagaggcagtaaaaatatttagagaaacgacaagtaggggtcttatactagacgatgttactcgcaacttgttcgtggcctccctttgcaaccatggaagaagcaaggaagctgctgagtttgcccatcagatgattgaaactggaacaacagtgagcatttccacatacagtataattcttggagaactttgtaggaataattgcactgaggaagcaatcatactgttccgcaaattaggtgcagtgaatgtgaagttcgatattacaatattcaataccatgattgatgcaatgtacagggttcaaagaagagaagaagctaacattttgtttgctgcaatatctgccaatggattggtacctaatgcttctacttacagaataatgataacaagtattgtaaaagaaggatcaatggaagaagctgatcatatgttttcatcaatggagacgagtggttatgctcccagctccgttctgttaaatgatatcatcagaatgttgctagaaaaaggtgagatagtcaaggctggaaattatttgtctaaagttgatgggaagtgcatttcacttgaagcttcaactggtttgttgatgatgcatctattttcaagagaaggcaaatatcatgagcaaataagatcactccctgcaaggtatgaatttttcggagtcagcacagttgag

SEQ ID NO: 2574 - DNA, 1089 bp, Triticum aestivum
  source 1..1089: mol_type = genomic DNA
atgtctgaactcggctgtgtgcctgatgccttgtcgtactccgtcgttctgaaggtcttgtgtgacgatagcaggagccaacgagcgctcgacctgctccagatgatgtcgaaagaaggaggtgggtgcgccccgaacgtggtggcatataggacgttcatccatggcttctgtaaggaaggcaaagtaagccaggcatgcgatctgttcgatgaaatggtgcagcaaggagttaagcctaatgtggtgacatacacctcagtaattgatgcgctgtgcaaggcaagagcaatggacaaggcagagtcgttccttcggcatatggtcaatcatggtgttcgacccaacaacgtgacctataagtatatgatccagggttattccactttgggctggtggaaagaggcagtaaaaatatttagagaaacgacaagtaggggtcttatactagacgatgttactcgcaacttgttcgtggcctccctttgcaaccatggaagaagcaaggaagctgctgagtttgcccatcagatgattgaaactggaacaacagtgagcatttccacatacagtataattcttggagaactttgtaggaataattgcactgaggaagcaatcatactgttccgcaaattaggtgcagtgaatgtgaagttcgatattacaatattcaataccatgattgatgcaatgtacagggttcaaagaagagaagaagctaacattttgtttgctgcaatatctgccaatggattggtacctaatgcttctacttacagaataatgataacaagtattgtaaaagaaggatcaatggaagaagctgatcatatgttttcatcaatggagacgagtggttatgctcccagctccgttctgttaaatgatatcatcagaatgttgctagaaaaaggtgagatagtcaaggctggaaattatttgtctaaagttgatgggaagtgcatttcacttgaagcttcaactggtttgttgatgatgcatctattttcaagagaaggcaaatatcatgagcaaataagatcactccctgcaaggtatgaatttttcggagtcagcacagttgag

SEQ ID NO: 2575 - DNA, 1089 bp, Triticum aestivum; identical to SEQ ID NO: 2573
  source 1..1089: mol_type = genomic DNA

SEQ ID NO: 2576 - DNA, 1089 bp, Triticum aestivum; identical to SEQ ID NO: 2573
  source 1..1089: mol_type = genomic DNA

SEQ ID NO: 2577 - DNA, 1089 bp, Triticum aestivum; identical to SEQ ID NO: 2574
  source 1..1089: mol_type = genomic DNA

SEQ ID NO: 2578 - DNA, 1089 bp, Triticum aestivum; identical to SEQ ID NO: 2573
  source 1..1089: mol_type = genomic DNA

SEQ ID NO: 2579 - DNA, 1104 bp, Triticum aestivum
  source 1..1104: mol_type = genomic DNA
atgattgatacaggagtacgaccggacacggctgtttatcgttccctaatccagggattttgtacacatggcgatttggtgaaagcaaaggaatatgttactgaaatgatgaacaaaggtatgcttcctcctgatattatgttcttcagttcaataatgcagaacctatgcacggaaggaagggtaatagaagcacgggatatcctcgacttgatggtgcacataggtatgaggcctgatgttcccatctttaatttgctgataggtggatactgcctagtctgcaagatggaggatgcaacaaaagtgtttgatgatatggtgtcatatggtttagaaccttgtaacattacggatggtatgcttattaatggctattgcaaaaatagaaggattgatgacgggcttattctgttcaaagagatgctgcacaagggacttaaacctacaacttttaattataacgtcatcttggatggattatttctggctggacgaactgttgccgcaaaggaaaagtttaatgagatggttgaatctggagtaagtatgtgcatcagtacttactctatagttcttggtggactttgtagaaatagttgcagtagcgaagcaatcacactattccagaaattaagcacgatgaatgtgaaatttgatattagaattgtcaatatcatgattggtgcattctacagggttcggcgaaaccaagaagctaaggatttgtttgccgcaataccatcaaatggcttggcagctaatgtagttacctacagcataatgataataaatcttataaaagaaggttcagtggaagaagctgacaatctttttttatctatggaaaagagtggttgtaccgctgactcttgtatgttaaatcatattatcagaaggctactggaaaaaggagagatggtcaaggctggaaattatatttctaaagttgatgcaaatagctactcacttgaagctaaaactgtttcgctgctgatctctctgttttcaaggaaagggaaatatagagaacacatcacattgctccctacaaagtatcagtttcgtgaagaagcggccacagttgagttgtttgatacatgg

SEQ ID NO: 2580 - DNA, 1104 bp, Triticum aestivum; identical to SEQ ID NO: 2579
  source 1..1104: mol_type = genomic DNA

SEQ ID NO: 2581 - DNA, 1104 bp, Triticum aestivum; identical to SEQ ID NO: 2579
  source 1..1104: mol_type = genomic DNA

SEQ ID NO: 2582 - DNA, 1104 bp, Triticum aestivum; identical to SEQ ID NO: 2579
  source 1..1104: mol_type = genomic DNA

SEQ ID NO: 2583 - DNA, 1104 bp, Triticum aestivum; identical to SEQ ID NO: 2579
  source 1..1104: mol_type = genomic DNA

SEQ ID NO: 2584 - DNA, 1104 bp, Triticum aestivum; identical to SEQ ID NO: 2579
  source 1..1104: mol_type = genomic DNA

SEQ ID NO: 2585 - DNA, 1188 bp, Triticum aestivum
  source 1..1188: mol_type = genomic DNA
atgcgggaaaaaggagtgagtcctgatgtagtcacctataccactgtaatagccgcactttccagaatgggtaggttgaccgatgctgtggacaaatttgatgagatgattgcaatgggagtacagccaagcatacctgtttatcagtccctgattcagggtttttgcatcgatggtgatttggttaaagccaaggagctggtttctgaaatgatgaacaaaggtattccttgtcctaacattgtgttcttcaattcagtaataaacagtctgtgcaaagaaggaagggttatggatgcacatgatatctttgacttggttatagacataggtgagaggcctgataccattacatttagttcactgattgacggatattgcttagtcggcaagatggataaagcattcggaatgcttaatgccatggaatcagttggtgttgagcctgatattgttacttacagtacactgcttgatggctattttaaaaatggaaggatagacgatggtttgactctgttcagagaaatgccgcgaaagagaattaaacctgacactgttacatatggcatcatactggatgggttgtttcgttctgggagaactgttgctgcatggaaaatgttccatgagatgatcgaaagtggaacaacagtgaccttttccatatacgctataatacttggaggtttttgtagaaataattgcgcagacgaagctatcaccctgttccacaaattaggtgcaatgaatgtgaagttcaatattgcaatagtcaataccatgatcaatgcaatgtacaaggttgggagaagagaagaagctaaggaactatttgctggaatattagcccgtgggttggtgcctaatgaatctacttacggagtaatgataaaaaatcttctaaaagatggagtagtggaagatgctaacaatgtgttttcatcaatggacaagagtggtatagtccccagctcccgtctcatcaatgacatcatcagattgttgttggaaaaaggtgagatcgccaaggccggatattatttgtctaaagttgatgggaagagcatatcacttgaagcttcaactacttcattgatgttttctctcttctcaatgaaaggcaaatataaggagcacatgaaattgctccctgccaagtatcaatttttcgatgagttggttgac

SEQ ID NO: 2586 - DNA, 831 bp, Triticum aestivum
  source 1..831: mol_type = genomic DNA
atgataaaatgcaacacggaagcaaatgacaagacaacaacaacgaataactggaagacacctggcgcaacggtctcggggcgttacactgatattgttacttacagtacactgcttgatggctattttaaaaatggaaggatagatgatggtttgactctgttcagagaaatgccgcgaaagagaattaaacctgacactgttacatatggcatcatactggatgggttgtttcgttctgtgagaattgttgctgcatggaaaatgttccatgagatgatcgaaagtggaacaacagtgaccttttccatatacgctataatacttggaggtttttgtagaaataattgcgcagacgaagctatcaccctgttccacaaattaggtgcaatgaatgtgaagttcaatattgcaatagtcaataccatgatcaatgcaatgtacaaggttgggagaagagaagaagctaaggaactatttgctggaatattagcccgtgggttggtgcctaatgaatctacttacggtgtaatgataaaaaatcttctaaaagatggagcagtggaagatgctaacaatgtgttttcatcaatggacaagagtggtatagtccccagctcccgtctcatcaatgacatcatcagattgttgttggaaaaaggtgagatcgccaaggccggatattatttgtctaaagttgatgggaagagcatatcacttgaagcttcaactacttcattgatgttttctctcttctcaaggaaaggcaaatataaggagcacatgaaattgctccctgccaagtatcaattttttgatgagttggttgac

SEQ ID NO: 2587 - DNA, 1188 bp, Triticum aestivum; identical to SEQ ID NO: 2585
  source 1..1188: mol_type = genomic DNA

SEQ ID NO: 2588 - DNA, 1188 bp, Triticum aestivum; identical to SEQ ID NO: 2585
  source 1..1188: mol_type = genomic DNA

SEQ ID NO: 2589 - DNA, 1188 bp, Triticum aestivum; identical to SEQ ID NO: 2585
  source 1..1188: mol_type = genomic DNA

SEQ ID NO: 2590 - DNA, 1188 bp, Triticum aestivum; identical to SEQ ID NO: 2585
  source 1..1188: mol_type = genomic DNA

SEQ ID NO: 2591 - DNA, 1188 bp, Triticum aestivum; identical to SEQ ID NO: 2585
  source 1..1188: mol_type = genomic DNA

SEQ ID NO: 2592 - DNA, 1188 bp, Triticum aestivum
  source 1..1188: mol_type = genomic DNA
atggatcctacggcccgtatagaaggccaatattcaaccgtaatacatacattttgcaaaaagggtaggttggatgatgctgtgataaagtttaatcagatgattgatacaggagtacgaccggacacggctgtttatagttccctaatccagggattttatacacatggagatttggtgaaagcaaaggaatatgttactgaaatgatgaagaaaggtatgcttcctcctgatattaagttcttccattcaatcatgcagaacctttgcacagaaggaagggtaatagaagcacgggatgtccttggcttgatagcgcacataggtatgaggcctgatgtttgcacatttaatatactgatcggtggatactgcctagtcggcaagatggaggatgcctcaaaaatatttgatgatatgatgtcatatggcttagaaccttctaatattacgtatggtatacttattaatggctattgcaaaaatagaaggattgatgacgggcttattctgttcaaagagatgctgcacaagggacttaaacctacaacttttaattataacgtcatactggatggattatttctggctggacgaactgttgctgcaaaggaaaagtttgatgagatggttgaatctggagtaagtgtgtgcattggtacatattcgacagttcttggtggactttgtagaaataattgtagcggcgaagcaatcacgctattccagaaattaagcacaatggatgtgaaattcaatattataattgtcaatataatgattgatgctttctacaaggttcagcgaaaccaagaagccaaggatttgtttgctgcagtatcagccaatggtttggtagctaatgtctttacctacaccataatgatgaaaaatcttataaaagaagggtcagtgggagaagctgacgatctctttttatcaatggagaagagctgctgtactgctgactcttatatgttaaatcttatcgtcagaatgttactgggaaaaggagagatagtcaaggctgggaattatatatctaaaattgatgcaaagagctactcacttgaagctaaaactgtttcgctgcttatctctctcttttcagggaaagggaaatatagagaacacataggattgctccatacaaagtatccgtttcgtgaagaagcagccacggttgtg

SEQ ID NO: 2593 - DNA, 1188 bp, Triticum aestivum
  source 1..1188: mol_type = genomic DNA
atggatcctacggcccgtatagaaggccaatattcaaccgtaatacatacattttgcaaaaagggtaggttggatgatgctgtgataaagtttaatcagatgattgatacaggagtacgaccggacacggctgtttatagttccctaatccagggattttatacacatggagatttggtgaaagcaaaggaatatgttactgaaatgatgaagaaaggtatgcttcctcctgatattaagttcttccattcaatcatgcagaacctttgcacagaaggaagggtaatagaagcacgggatgtccttggcttgatagcgcacataggtatgaggcctgatgtttgcacatttaatatactgatcggtggatactgcctagtcggcaagatggaggatgcctcaaaaatatttgatgatatgatgtcatatggcttagaaccttctaatattacgtatggtatacttattaatggctattgcaaaaatagaaggattgatgacgggcttattctgttcaaagagatgctgcacaagggacttaaacctacaacttttaattataacgtcatactggatggattatttctggctggacgaactgttgctgcaaaggaaaagtttgatgagatggttgaatctggagtaagtgtgtgcattggtacatattcgacagttcttggtggactttgtagaaataattgtagcggcgaagcaatcacgctattccagaaattaagcacaatggatgtgaaattcaatattataattgtcaatataatgattgatgctttctacaaggttcagcgaaaccaagaagccaaggatttgtttgctgcagtatcagccaatggtttggtagctaatgtctttacctacaccataatgatgaaaaatcttataaaagaagggtcagtggaagaagctgacgatctctttttatcaatggagaagagcggctgtactgctgactcttatatgttaaatcttatcgtcagaatgttactgggaaaaggagagatagtcaaggctgggaattatatatctaaaattgatgcaaagagctactcacttgaagctaaaactgtttcgctgcttatctctctcttttcagggaaagggaaatatagagaacacataggattgctccctgcaaagtatcggtttcgtgaagaagcagccacagttgtg

SEQ ID NO: 2594 - DNA, 1185 bp, Triticum aestivum
  source 1..1185: mol_type = genomic DNA
atggtaagtctgggccaaaaaccgaccgttactacctacagcattttgctccatgggtatgctatggagcaatcttttcatgagatgcattgtctcattgatttgatggtgggaaatggtattgcgccaaatcattttgtctacaacatactcatatctgcatatgctcaagaagaaacggttggtgaggtaatgcatatatttacaaaaatgcggcaggaaggattgaaccctgatgttgcgaactatggagcggtaataaacttgctttctagtattggccgaatggatgatgctatgtcccaatacaatcaaatgataactgaaggattactccctggtatcatagttttcaccccccttattagtggtttttgttcttgtggcaaatgggagaaggttgatgaactattttctgagatgttggatcgcggcatctgtcccgacacagtgttcttcaacactgttatggatcacctttgcaaaaatggaagggttatagaagcccaggatctcttcgacctgatggtacacatgggtgtgaagccttttgtccgtgattacaacacactgatacatggatactgtttagttggtaagatggatgaagggaggaagttacttgacaatatgtgctcaattggcttgaaaccggatgatttcacctatagcatactgattgatggttactctatgaagggaaggataggtgatgcattgattgttgtcagggaaatgttggacaggaaggttaaaccttctattatcacttttaatattatgattggtgcgttgcttaaaggtggcagaaaggaagaagccaaagatttgtttgatggtatctgggccaaaggattagtgcctgacgttgttacatatagattaatgatacaaaagcttatagaagaaggttctctacaagattctgatgatctattcctttctatggagaagaatggatgtgttgccgactcccgtatgctaaatgctatagttagaagcttacttcagaaaggggacgtgccgagggctgggacttatctgtctaaaattgatgagaggaggttcacctttgaagcttccactgctagcttattgacttcacttgcgtcaggggggaaaggccaggaatataaggagttactccctgaagaataccactcttttctggaacagggcactggt

SEQ ID NO: 2595 - DNA, 1185 bp, Triticum aestivum; identical to SEQ ID NO: 2594
  source 1..1185: mol_type = genomic DNA

SEQ ID NO: 2596 - DNA, 1185 bp, Triticum aestivum; identical to SEQ ID NO: 2594
  source 1..1185: mol_type = genomic DNA

SEQ ID NO: 2597 - DNA, 1122 bp, Triticum aestivum
  source 1..1122: mol_type = genomic DNA
atggaacaatcttttcatgagatgcattgtctcattgatttgatggtgggaaatggtattgcgccaaatcattttgtctacaacatactcatatctgcatatgctcaagaagaaacggttggtgaggtaatgcatatatttacaaaaatgcagcaggaaggattgaaccctgatgttgcgaactatggagcggtaataaacttgctttctagtattggccgaatggatgatgctatgtcccaatacaatcaaatgataactgaaggattactccctggtatcatagttttcaccccccttattagtggtttctgttcttgtggcaaatgggagaaggttgatgaactattttctgagatgttggatcgcggcatctgtcccgacacagtgttcttcaacactgttatggatcacctttgcaaaaatggaagggttatagaagcccaggatctcttcgacctgatggtaaacatgggtgtgaagccttttgtccgtgattacaacacactgatacatggatactgtttagttggtaagatggatgaagggaggaagttacttgacaatatgtgctcaattggcttgaaaccggatgatttcacctatagcatactgattgatggttactctatgaagggaaggataggtgatgcattgattgttgtcagggaaatgttggacgggaaggttaaaccttctattatcacttttaatattatgattggtgcgttgcttaaaggtggcagaaaggaagaagccaaagatttgtttgatggtatctgggccaaaggattagtgcctgacgttgttacatatagattaatgatacaaaagcttatagaagaaggttctctacaagagtctgatgatctattcctttctatggagaagaatggatgtgttgccgactcccgtatgctaaatgctatagttagaagcttacttcagaaaggggacgtgccgagggctgggacttatctgtctaaaattgatgagaggaggttcacctttgaagcttccactgctagcttattgactgcacttgcgtcaggggggaaaggccaggaatataaggagttactccctgaagaataccactcttttctggaacagggcactggt

SEQ ID NO: 2598 - DNA, 1122 bp, Triticum aestivum
  source 1..1122: mol_type = genomic DNA
atgtctcgcctccgcctcctccgccgcagctcctcctccaccacactgataccccgcctccggctcctccgccgctgctccacctccacctccacctcaccgccctcaggcccctggtctccccgagacgcttttgtcgccgccatagagcgtgttcgcgccgggacgctcagcccggaagacgctcaccacctgttcgacgatttgctcggtcaagccaccccggtccccgatcgcaccatgaacggcgtcctcgcccgtgccacgtcccccgccgcctgcatcagagatggccccgcccttgccgtcgctctcttcaaccgtgtgtgccgagaagaggccggtccgcatgtggcggcgcccacagtccacacctatggcatcctcatggactgctgctgccgcgcacgtcgcccggacctagggcttgccttattcggccgcttcctcaggacaggcctgaaggcaaacgagatcgtcgccaccaccttcctcaagtgcctctgctgcgcgaaacggacagaagaggctgtgaaagtactgcttcacaggatgcccgagctgggctgtgtgcctaatgccatctcgtactccatagttttgaaaagcttgtgtgaaaatagcatgagtcagcaggcactcgacctgctccagatggcgacaaaagaaggaggctgccttcctgatgtggtggcatatagcgcaatcatccatggcttctttaaggagggcgaaatagacaaggcatgccatctattccatgaaatgatgcggcaaggggttgtgccgactgtggtgacatacaacataataattgatgcgttgtgcaaggccggagaaatggacaaggcagagctagtctttcagcggatggctcgtaatggtgcgcggcctaataaagcgacatgtaatggcagtaaatttagttcactgactgacggatattgctcagtcgccaagatggataaaacattcaaactgcttgatgccatgatatcagttggaattgagcctgatgctgttacttatagtgcacttcttgatggctattttaaaaatggaaggatcgatgatggtttgaccctatttagagaaatgtcgtgcgagttaaacctacaactg

SEQ ID NO: 2599 - DNA, 1122 bp, Triticum aestivum; identical to SEQ ID NO: 2598
  source 1..1122: mol_type = genomic DNA

SEQ ID NO: 2600 - DNA, 1122 bp, Triticum aestivum
  source 1..1122: mol_type = genomic DNA
atgtctcgcctccgcctcctccgccgcagctcctcttccaccacactgataccccgcctccggctcctccgccgctactccacctccacctccacctcaccgccctcaggcccctggtctccccgagacgcttttgtcgccgccatagagcgtgttcgcgccgggacgctcagcccggaagacgctcaccacctgttcgacgatttgctcggtcaagccaccccggtccccgatcgcaccatgaacggcgtcctcgcccgtgccacgtcccccgccgcctgcatcagagatggccccgcccttgccgtcgctctcttcaaccgtgtgtgccgagaagaggccggtccgcatgtggcggcgcccacagtccacacctatggcatcctcatggactgctgctgccgcgcacgtcgcccggacctagggcttgccttattcggccgcttcctcaggacaggcctgaaggcaaacgagatcgtcgccaccaccttcctcaagtgcctctgctgcgcgaaacggacagaagaggctgtgaaagtactgcttcacaggatgcccgagctgggctgtgtgcctaatgccatctcgtactccatagttttgaaaagcttgtgtgaaaatagcatgagtcagcaggcactcgacctgctccagatggcgacaaaagaaggaggctgccttcctgatgtggtggcatatagcgcaatcatccatggcttctttaaggagggcgaaatagacaaggcatgccatctattccatgaaatgatgcggcaaggggttgtgccgactgtggtgacatacaacataataattgatgcgttgtgcaaggccggagaaatggacaaggcagagctagtctttcagcggatggctcgtaatggtgcgcagcctaataaagcgacatgtaatggcagtaaatttagttcactgactgacggatattgctcagtcgccaagatggataaaacattcaaactgcttgatgccatgatatcagttggaattgagcctgatgctgttacttatagtgcacttcttgatggctattttaaaaatggaaggatcgatgatggtttgaccctatttagagaaatgtcgtgtgagttaaacctacaactg

SEQ ID NO: 2601 - DNA, 1122 bp, Triticum aestivum; identical to SEQ ID NO: 2598
  source 1..1122: mol_type = genomic DNA

SEQ ID NO: 2602 - DNA, 1122 bp, Triticum aestivum; identical to SEQ ID NO: 2598
  source 1..1122: mol_type = genomic DNA

SEQ ID NO: 2603 - DNA, 1122 bp, Triticum aestivum; identical to SEQ ID NO: 2598
  source 1..1122: mol_type = genomic DNA

SEQ ID NO: 2604 - DNA, 1122 bp, Triticum aestivum; identical to SEQ ID NO: 2598
  source 1..1122: mol_type = genomic DNA

SEQ ID NO: 2605 - DNA, 1053 bp, Triticum aestivum
  source 1..1053: mol_type = genomic DNA
atgaagctcaaaatgcctgggcccggcggaataatcactctcgttagtaatccgtacatagcactccgcgctgaaaacaagacagccgcattagccttagaggcactatccgaagccctagcggcagaggaactcaccgcgctgcgctctacggtgaatagggacgatgtgatactcgataagagatccaagtccacctcctttaaaccagcggatgaaatagtcaaattccaagtccacccaacggaccctaccaaaacaacctccatcagggcacagttaaaccccgttgtggacgccgcactacgagagttcctgcgcgagaattgggacatattcgcctggcatccttcagacatgccaggaatcccacgcaggctggccgagcatagcctcaatatcctaaagggagttataaacaacctgagcaaagaaggaaatgtaaaggatgcacaagatatgtttgacttcattgtaggtattggtcatcagcctgatgttattatgtacaattcactgatggatggatattgccttgttggcaaggtggaggaagcaatgacagtgcttgatgctatgaagtccgctggcctccaacctgatgctattacgtatgctatacttcttaatggctactgtaaaattggaaggatcgacgatggattgagtctttttagggaaatctcactcagcagggttaagcccacgactattatgtacaacattatacttgatgggctgttttgctgtgggagaacagtttttgcaaaggaagaattcgatacaatgattgaaagtggcataccggtgggcattgacacatgcaccatagttcttagtggactttgcaaaaataattgcactgatgaagcaatagagctgttcaagaagttatgtgcaatgaatgtgaagtttgatgtcataattctcactaccatgatttctgcaatgtttaagactaggagaattgaagaagccaaggatttgtttgctactatatcaaccatagggttggtgccttctgttgtgacttacagtgtaattttttttttt

SEQ ID NO: 2606 - DNA, 942 bp, Triticum aestivum
  source 1..942: mol_type = genomic DNA
atggactgctgctgccgggcgcgtcgcccggatctagggcctgctttccttgggcgcctcctcaggacgggcctgaagacaaaccagatcgtcgccaacaccctcctcaagtgcctctgctacgccaaacggacggatgaggctgtcaatgtattgcttcacaagatgtccgagctcggctgcgtgcctgatgccatctcatacaacacagttcttaagagcttatgtgaagatagcagaagccaggaagcactcgacctgctctggatggtggcaaaagaaggaggtgtcggctctctcgatgtggtatcccatagcactgtcatccatggcttctttaaggaaggcgaaacaggcaaggcatgcaatctattccatgaaatgacacatcaagggattgtgcccaatgtgatgacatataacttgattattgctgcgttgtgcaaggccagagcaatggacaaggcagagctgatccttcggcagatggttgataacggtgttcgacccaatacagttacttgcagctcgctcatgtcttccctttgcaagcatggaagaagcaaagaagctgcagaaatttttgactccatgactgccaagggcctcaaacctgatatcgtcgcatactctattctgcttcatggatatgccactgaaggatgccttgctgatatgattgatctcttcaattcaatgaaaaacaatggtattgaagccacttgtcaagttttcaacatattaattggtgcatatgctaaatgtggaatgatggatgaggctatgctcatatttactgaaatgcggcgacaaggagtgagtccggatgtattcacctatacaactgtaatagtctcactttttcgaacgagtagactggccgatgctattgacaaattcgatgagatgattgccattggagtacagccaaacagacctgtt

SEQ ID NO: 2607 - DNA, 942 bp, Triticum aestivum; identical to SEQ ID NO: 2606
  source 1..942: mol_type = genomic DNA

SEQ ID NO: 2608 - DNA, 942 bp, Triticum aestivum
  source 1..942: mol_type = genomic DNA
atggactgctgctgccgggcgcgtcgcccggatctagggcctgctttccttgggcgcctcctcaggacgggcctgaagacaaaccagatcgtcgccaacaccctcctcaagtgcctctgctacgccaaacggacggatgaggctgtcaatgtattgcttcacaagatgtccgagctcggctgcgtgcctgatgccatctcatacaacacagttcttaagagcttatgtgaagatagcagaagccaggaagcactcgacctgctctggacggtggcaaaagaaggaggtgtcggctctctcgatgtggtatcccatagcactgtcatccatggcttctttaaggaaggcgaaacaggcaaggcatgcaatctattccatgaaatgacacatcaagggattgtgcccaatgtgatgacatataacttgattattgctgcgttgtgcaaggccagagcaatggacaaggcagagctgatccttcggcagatggttgataacggtgttcgacccgatacagttacttgcagctcgctcatgtcttccctttgcaagcatggaagaagcaaagaagctgcagaaatttttgactccatgactgccaagggcctcaaacctgatatcgtcgcatactctattctgcttcatggatatgccactgaaggatgccttgctgatatgattgatctcttcaattcaatgaaaaacaacggtattgaagccacttgtcaagttttcaacatattaattggtgcatatgctaaatgtggaatgatggatgaggctatgctcatatttactgaaatgcggcgacaaggagtgagtccggatgtattcacctatacaactgtaatagtctcactttgtcgaacgagtagactggccgatgctattgacaaattcgatgagatgattgccattggagtacagccaaacagacctgtt

SEQ ID NO: 2609 - DNA, 942 bp, Triticum aestivum; identical to SEQ ID NO: 2606
  source 1..942: mol_type = genomic DNA

SEQ ID NO: 2610 - DNA, 942 bp, Triticum aestivum; identical to SEQ ID NO: 2606
  source 1..942: mol_type = genomic DNA

SEQ ID NO: 2611 - DNA, 777 bp, Triticum aestivum
  source 1..777: mol_type = genomic DNA
atgtccgagctcggctgcgtgcctgatgccatctcatacaacacagttcttaagagcttatgtgaagatagcagaagccaggaagcactcgacctgctctggacggtggcaaaagaaggaggtgtcggctctctcgatgtggtatcccatagcactgtcatccatggcttctttaaggaaggcgaaacaggcaaggcatgcaatctattccatgaaatgacacatcaagggattgtgcccaatgtgatgacatataacttgattattgctgcgttgtgcaaggccagagcaatggacaaggcagagctgatccttcggcagatggttgataacggtgttcgacccgatacagttacttgcagctcgctcatgtcttccctttgcaagcatggaagaagcaaagaagctgcagaaatttttgactccatgactgccaagggcctcaaacctgatatcgtcgcatactctattctgcttcatggatatgccactgaaggatgccttgctgatatgattgatctcttcaattcaatgaaaaacgacggtattgaagccacttgtcaagttttcaacatattaattggtgcatatgctaaatgtggaatgatggatgaggctatgctcatatttactgaaatgcggcgacaaggagtgagtccggatgtattcacctatacaactgtaatagtctcactttttcgaacgagtagactggccgatgctattgacaaattcgatgagatgattgccattggagtacagccaaacagacctgtt

SEQ ID NO: 2612 - DNA, 942 bp, Triticum aestivum; identical to SEQ ID NO: 2606
  source 1..942: mol_type = genomic DNA

SEQ ID NO: 2613 - DNA, 1098 bp, Triticum aestivum
  source 1..1098: mol_type = genomic DNA
atgtgcaaggcaggagcaatggacaagacagagctggtccttcggccaatggtcgataatggtgtccgaccggataaaatgatatgtaatagtatgatccatggatattcaactttgggccggtggaaagaggcgggtaaagtgttcagagaaatgacaagccggggtcttataccagatattttcacttggaactcgttcatgggctccctttgcaagcatggaagaagcaaagaagctgcagaaattttcttttccatggctgcaaagggccacaaacctaatattgtctcctacattcttcttcttcgtgtgtatgccaatgaaggaagatttgctgatatgatgagtctccttaatttaatggaaggcgacggtattgtagccaactgccaaattttcaccatattaattgatgcatatgctaaacaaggaatgattgatgaagctatgcttgtacttactgacatgcggggacaaggactgagtccggatgtattcacctattcagctctattatctgcactttgtagaatgggtaggctggctgatgctatggataagttcactcagatgattggcacgggagtacaaccgaacacagttgtttatcactccctagttcagggcttatgtacacatggtgatttggcgaaagcgaaggagttagtttctaaaatgatgaataaaggtattgctcgtccaaacattgcattgttcagttcaataatggccagtctatgcaatgaaggaagggttatggatgcacaccatatctttgacttggttacagacataggtgagaaacctaatatcattatgtttactacgctgattgatggatattgcttagtcggcaagatggacaaagcatgtggagtacttgatgccatggtatcagctggcattgagcctaatgtcgttacatatagtacacttgtcagtggatattgtaaaaatggacggatcgataatgggttgattctgttcagagacatgttgagaactgctgctgcaaagaaaatgttccgtgagattatcgaaagtagaataattgtgagcatttctacatataatataattcttgggatgactttg

SEQ ID NO: 2614 - DNA, 1098 bp, Triticum aestivum
  source 1..1098: mol_type = genomic DNA
atgtgcaaggcaggagcaatggacaagacagagctggtccttcggccaatggtcgataatggtgtccgaccggataaaatgatatgtaatagtatgatccatggatattcaactttgggccggtggaaagaggcgggtaaagtgttcagagaaatgacaagccggggtcttataccagatattttcacttggaactcgttcatgggctccctttgcaagcatggaagaagcaaagaagctgcagaaattttcttttccatggctgcaaagggccacaaacctaatattgtctcctacattcttcttcttcgtgtgtatgccaatgaaggaagatttgctgatatgatgagtctccttaatttaatggaaggcgacggtattgtagccaactgccaaattttcaccatattaattgatgcatatgctaaacaaggaatgattgatgaagctatgctcgtacttactgacatgcggggacaaggactgagtccggatgtattcacctattcagctctattatctgcactttgtagaatgggtaggctggctgatgctatggataagttcactcagatgattggcacgggagtacaaccgaacacagttgtttatcactccctagttcagggcttatgtacacatggtgatttggcgaaagcgaaggagttagtttctaaaatgatgaataaaggtattgctcgtccaaacattgcattgttcagttcaataatggccagtctatgcaatgaaggaagggttatggatgcacaccatatctttgacttggttacagacataggtgagaaacctaatatcattatgtttactacgctgattgatggatattgcttagtcggcaagatggacaaagcatgtggagtacttgatgccatggtatcagctggcattgagcctaatgtcgttacatatagtacacttgtcagtggatattgtaaaaatggacggatcgataatgggttgattctgttcagagacatgttgagaactgctgctgcaaagaaaatgttccgtgagattatcgaaagtagaataattgtgagcatttctacatataatataattcttgggatgactttg

SEQ ID NO: 2615 - DNA, 1098 bp, Triticum aestivum; identical to SEQ ID NO: 2614
  source 1..1098: mol_type = genomic DNA

SEQ ID NO: 2616 - DNA, 1098 bp, Triticum aestivum; identical to SEQ ID NO: 2614
  source 1..1098: mol_type = genomic DNA

SEQ ID NO: 2617 - DNA, 1098 bp, Triticum aestivum
  source 1..1098: mol_type = genomic DNA
atgtgcaaggcaggagcaatggacaagacagagctggtccttcggccaatggtcgataatggtgtccgaccggataaaatgatatgtaatagtatgatccatggatattcaactttgggccggtggaaagaggcgggtaaagtgttcagagaaatgacaagccggggtcttataccagatattttcacttggaactcgttcatgggctccctttgcaagcatggaagaagcaaagaagctgcagaaattttcttttccatggctgcaaagggccacaaacctaatattgtctcctacattcttcttcttcgtgtgtatgccaatgaaggaagatttgctgatatgatgagtctccttaatttaatggaaggcgacggtattgtagccaactgccaaattttcaccatattaattgatgcatatgctaaacaaggaatggttgatgaagctatgctcgtacttactgacatgcggggacaaggactgagtccggatgtattcacctattcagctctattatctgcactttgtagaatgggtaggctggctgatgctatggataagttcactcagatgattggcacgggagtacaaccgaacacagttgtttatcactccctagttcagggcttatgtacacatggtgatttggcgaaagcgaaggagttagtttctaaaatgatgaataaaggtattgctcgtccaaacattgcattgttcagttcaataatggccagtctatgcaatgaaggaagggttatggatgcacaccatatctttgacttggttacagacataggtgagaaacctaatatcattatgtttactacgctgattgatggatattgcttagtcggcaagatggacaaagcatgtggagtacttgatgccatggtatcagctggcattgagcctaatgtcgttacatatagtacacttgtcagtggatattgtaaaaatggacggatcgataatgggttgattctgttcagagacatgttgagaactgctgctgcaaagaaaatgttccgtgagattatcgaaagtagaataattgtgagcatttctacatataatataattcttgggatgactttg

SEQ ID NO: 2618 - DNA, 1098 bp, Triticum aestivum; identical to SEQ ID NO: 2614
  source 1..1098: mol_type = genomic DNA

SEQ ID NO: 2619 - DNA, 1125 bp, Triticum aestivum
  source 1..1125: mol_type = genomic DNA
atgccccgcctccgtcgcttctccaccgtgccgatgctccacctcctccgccgcagctcctcttccacctccacctcgctgccctcacacccctggtctccccacgaagcctttgccgcggccacagagcgcgtccgcgccgggacgctaaccccggaagaagcacacaacctgttcgacggcttccccggtccccagccgctccctgaacggcttccttgccgccctcgcccgtgcgccggcctccgcaacctgccgcagagatggccctgccctcgcccttgccctcttcaaccgcgtatgccgagaagaagccggcccgcaggtggcatcctcatgggctgcttctgcggtgcgcatcgcccggacctagggcttgccttatttggccgcttcctcgggacaggcctcaagacaaacaagattgtggccaccaccttcctcaagtgcctctgctacgccaaacgtacagatgaggctgtcaacttgctgcttcgtaggatgcccgagcttggctgcgtgcctgatgcaatctcatacaccattgttctgaagagcttatgcgagaatagcatgagtcagcgggcacttgacctgctccagatggtggcagaaggaggaggtgcctgctccctcaatgtggtggtgtatagcacagtcatccatggcttcttcaaggagggcgaaacaggcaaggcatgcaatctattccatgaaatgatccatcaaggggttgtgcccaatgtggtcacgtatagctcgattattgatgcgttgtgcaaggccagagcaatggacaaggcagagctagtccttcaacagatggttgatagtggtgctcaaccgaataatgtgacatataattgcatgatccatggatattccacatcagggcagttgaaagaggctgctaaaatgtttagaaaaatgacaagccatggtcttgtaccaaatgcagtcacttgcagctcgttaatgacttccctttgcaagcatggaagaagcaaagaagcggcggaaatattttattccatgactgccaagggccacaaaccggatgccgtctcgtaccgtattttgcttcatgggtatgccaatgaaggatgctttgctgatatgattgat

SEQ ID NO: 2620 - DNA, 1167 bp, Triticum aestivum
  source 1..1167: mol_type = genomic DNA
atgtttgatgtatacaagaagtgtgcaaaacgaagggaagagcttttgctcggccgaccgcttgtacacacatccgttggcttggaaatgacctcctcgccgatgtgccgcatcggcctccgccaccgccgctcctcctcctccacctcactgatgtcccgcctccgcctactcgggcgcagctcctcctccacctccacctccccgcgctcacgcccctggtctccccacgccgcctttgccgctgccacacagcgggtcagcgctgggacgttcagcccggaacacgcacaccaactgttcgacgaattgctccggcagggcactccggtccccgatttctccctggacggcttccttgccgctctcgcccgtgctacgtcctccgcggcctgcagagatggccccgccctcgcgctcgccctcttcaaccgcttatgccgagaagaagctggcccgcgggtggcgcagcccacaatcttcacctacggcgtcctcatgaactgctgcgtccgcactcgccgcccgcaactggggcttgccttcttcggccgtgtcctcaggacggacctgaagacaaacacgatcgtcttcagctccctcctcaagtgcctctgccacgccaaacggacagacgaggatgtcagcgtgctgcttcataggatgcccgagctcggttgtgtgcctgatgccttctcatacaccattgttcttaagagcttatgtgatgatagcagcagccagcgggcgctcgacctgctccagactatggagaaaggaggaggtgtctgctcccctgatgtggtgtcatataccacggtcatccacggcctccttaaggaaggggaagtaagcaaggcatgcagtctattcgatgaaatggtgcagcaaggggttgtgcctaatgtggtgacatacagctcgattattgatgcgctgtgcaaggctggagtgatggacaagacggagttggtccttcggcagatggttgatagtggcatccaaccggataacgtgacatatactagcatgatccatggatattccacgttgggccggtggaaagaagctgacaagccggggtatcataccagatgttgttacttggacctcattcatgacctccctctgcaagcatggaagaagcagagaagctgccggaattat

SEQ ID NO: 2621 - DNA, 1032 bp, Triticum aestivum
  source 1..1032: mol_type = genomic DNA
atgaagcgcacagaggaggctctgaacgtgctgctccataagatgcccaacgacctgcctaatgtcatctcctactcagtgattctcaagagcttctgcgacaatgggaggagccagcttgcgcttgatctgctccagatgatggccaaaaaaggcgctgaccactcccccgacgtgatgtcatacaacatggtaattgatggcttctttaaggagggtgaagtaagcaaagcatgcgatctattccaagaaatgatacgacaggggattgtgcctactgaggtgacatatagctccattatcaatgcgctatgcaaagcaagagcaatggacaaggcagaggtggttcttcgatcaatggttcataatggtgcccaaccagatgctgtgacatataatagcttgatccaaggatattcaactttgggacagttgaaagaagtcgctaggttgttgaaagtgatgagaagtcaaggtgttatgccaagcgttgttacctacaacttactcatgacctgcctttgcaagcatggaaaaaccaaagaagctgagaaaatattttattctatggccgtgaacggacgaaaacctgatgtcatctcatactctattttgctccatgggtacgctaaagaaggatccctcattgatatgattgatctctgtgagcggatggcaagagatggagttgtacccaacctccattgtttcaacatactgattaatgcatatgctaagcatggaatgatgggtgtggccctgcttttcttcgaagatatgttgaagcagggggtgaagcctagtgaattcacttatttaactgtgatatctgcattttgcaagatgggcaggatggatgatgcgatggaaaaattccgtgagatgattgatatgggagtaccagttgacacagaagtttacatgtgcatagttgagggttattttaaaaatggtgattcagtgaaagccaaggattttattaccaaaatgaagaacaaggatattccaaataggccgcagaagggtaattat

SEQ ID NO: 2622 - DNA, 1032 bp, Triticum aestivum; identical to SEQ ID NO: 2621
  source 1..1032: mol_type = genomic DNA

SEQ ID NO: 2623 - DNA, 1032 bp, Triticum aestivum; identical to SEQ ID NO: 2621
  source 1..1032: mol_type = genomic DNA

SEQ ID NO: 2624 - DNA, 1032 bp, Triticum aestivum; identical to SEQ ID NO: 2621
  source 1..1032: mol_type = genomic DNA

SEQ ID NO: 2625 - DNA, 1032 bp, Triticum aestivum; identical to SEQ ID NO: 2621
  source 1..1032: mol_type = genomic DNA

SEQ ID NO: 2626 - DNA, 801 bp, Triticum aestivum
  source 1..801: mol_type = genomic DNA
atgaagcgcacagaggaggctctgaacgtgctgctccataagatgcccaacgacctgcctaatgtcatctcctactcagtgattctcaagagcttctacgacaatgggaggagccagcttgcgcttgatctgctccagatgatggccaaaaaaggcgctgaccactcccccgacgtgatgtcatacaacatggtaattgatggcttctttaaggagggtgaagtaagcaaagcatgcgatctattccaagaaatgatacgacaggggattgtgcctactgaggtgacatatagctccattatcaatgcgctatgcaaagcaagagcaatggacaaggcagaggtggttcttcgatcaatggttcataatggtgcccaaccagatgctgtgacatataatagcttgatccaaggatattcaactttgggacagttgaaagaagtcgctaggttgttgaaagtgatgagaagtcaaggtgttatgccaagcgttgttacctacaactcactcatgacctgcctttgcaagcatggaaaaaccaaagaagctgagaaaatattttattctatggccgtgaacggacgaaaacctgatgtcatctcatactctattttgctccatgggtacgctaaagaaggatccctcattgatatgattgatctctatgagcggatggcaagagatggagttgtacccaacctccattgtttcaacatactgattaatgcatatgctaagcatggaatgatggatgtggccctgcttttcttcgaagatatgttgaagcagggggatgaagcc

SEQ ID NO: 2627 - DNA, 753 bp, Triticum aestivum
  source 1..753: mol_type = genomic DNA
atgtcaaccgcccgcctgtgctccaccttcacctcctccttgaaggctccttcacgaaaaccacgagccccccgcctcgccgccttggctgccgccacggagcgtgtccgcgctggaacgctaactcggcaggacgcgcacaagctgttcgacaaattgctgagccaagccgcgacagtcccagtacgcaagctgaacaactttcttgccgccctcgcccgtgcaccgccctcagctgcctgcagcgatggtccgggccttgccatcgccctcttcaaccgcatgtcccgaggcgctggtgcacgggtggcgtcgcccacgctctgtacctattccatcctcatggactgctgctgccgcgcaggccgcccggacttggtgcttgccttcttcagccgcctcctcaggttggggctgagcttgaatgtcatctccttcagcaatctcctcaaggggctttgccaggccaagcgctcaaatgaggctttggacatgctgctccaccggacacctgaactacactgtgcgcctgatgtcttctcgtacaacatagtaatcaacggctgcttgaaagaaggtgaagtagacaaagcgtgcaatctcttccatgagatgccccaactgggagttcaacctgatgtggtgacctacacctcaatcatggacgcactaagcaagtccggagcaatggacaaggcagaagtgctccttcggcaaatggttgatcaaggaattgaacccaatatcaagaca

SEQ ID NO: 2628 - DNA, 915 bp, Triticum aestivum
  source 1..915: mol_type = genomic DNA
atggggcacgtcattaagttgggatttacagcagaagctattgtcaatttcaaccacctactcaaggccatctgtgcggagaagaagaccagctatgcaatggacatcgtactccgagtaatgcctgaatttaactgcacaccgaacattttctcctactacattcttttcaagggtctctgcaacgagaagagaagccaagaggctctcgagctgattcaaattatggttgaggatggaggttgctgccgacctgatgtggtgacctatagcactgtaattgatggcttgttgaaagagggtgaggtggaccaagcttacagcctattttctgaaatgctgcgtcagggggtatcaccgaatattgtgacctgtaattcaatcatctctggcatgtgcaagcttcacgcgatggacaaggctgaggaggttcttcaacagatgtttgatagaagaattctgccagatgttgccacatatactagtctaatacatggatattattcattaggacagtgcaaagaggtggatcggattctcaatgaaatgtgtaaacatggtgttcaaccagatattgtaacttacaatatacagatggattatctttgcaagagcggaaggtgcgcagaagctaggaatctattagattctttgatcggtttgggccaaaaaccagatgttactacctacagtattctgcttcatgggtatgccatggaaaaatcttttgatgagatgcattgtctcattgatttgatggtaggaaatggtgttgcaccagatcatcatatctacaacatactcatatctgcatatgctaaagaagaaacggttggtgaggtaatggatatatttacaaaaatgcggcagcaaggattgaaccctgatgttgagagaattgcatgtagtggggat

SEQ ID NO: 2629 - DNA, 915 bp, Triticum aestivum; identical to SEQ ID NO: 2628
  source 1..915: mol_type = genomic DNA

SEQ ID NO: 2630 - DNA, 915 bp, Triticum aestivum; identical to SEQ ID NO: 2628
  source 1..915: mol_type = genomic DNA

SEQ ID NO: 2631 - DNA, 987 bp, Triticum aestivum
  source 1..987: mol_type = genomic DNA
atgtttgaaatgatgaacggtggtattcttcggcctaacattgtgttcttcaattcagtaataaacagtctgtacaaagaaggaagggttatggatgcacatgatgtcttagacttggttataggcataggtgagaggcctgataccattacatttagttcactgattgacggatattgcttagtcgggaagacggataaagcattcaaaatacttgatgccatggaatcagttggtgttgagcctgatattgttacttacaatacactgcttgatggctattttaaaaacagaaggattgatgatgctttgactttgtttagagaaatgccgcgtaagagaattaaacctggcactgttacatatggcatcatgttggatgggttgtttcgtgctgggagaactgttgccgcaaagaaaatgttccatgagatgaacgagagtggaacaacggtggacatttccacatacgctataatacttggaggtttttgtagaaataattgtgcagacgaagctatcaccctattccacaaattaggtgcaatgaatgtgaagttcaatattgcaatagtcaataccatgatcaatgcaatgtacaaggttgggagaagagaagaagctaaggaactatttgctggaatattagcccgtgggttggtgcctaatgaatctacttacggagtaatgataaaaaatcttctaaaagatggagcagtggaagatgctaacaatgtgttttcatcaatggacaagagtggtatagtccccagctcccgtctcatcaatgacatcatcagattgttgttggaaaaaggtgagatcgccaaggccggatattatttgtctaaagttgatgggaagagcatatcacttgaagcttcaactacttcattgatgttttctctcttctcaaggaaaggcaaatataaggagaacatgaaattgctccctgccaagtatcaatttttcgatgtgttggttgac

SEQ ID NO: 2632 - DNA, 912 bp, Triticum aestivum
  source 1..912: mol_type = genomic DNA
atgtttgaaatgatgaacggtggtattcttcggcctaacattgtgttcttcaattcagtaataaacagtctgtacaaagaaggaagggttatggatgcacatgatgtcttagacttggttataggcataggtgagaggcctgataccattacatttagttcactgattgacggatattgcttagtcgggaagacggataaagcattcaaaatacttgatgccatggaatcagttggtgttgagcctgatattgttacttacaatacactgcttgatggctattttaaaaacagaaggattgatgatgctttgactttgtttagagaaatgccgcgtaagagaattaaacctggcactgttacatatggcatcatgttggatgggttgtttcgtgctgggagaactgttgccgcaaagaaaatgttccatgagatgaacgagagtggaacaacggtggacatttccacatacgctataatacttggaggtttttgtagaaataattgtgcagacgaagctatcaccctrttccacaaattaggtgcaatgaatgtgaagttcaatattgcaatagtcaataccatgatcaatgcaatgtacaaggttgggagaagagaagaagctaaggaactatttgctggaatattagcccgtgggttggtgcctaatgaatctacttacggagtaatgataaaaaatcttctaaaagatggagcagtggaagatgctaacaatgtgttttcatcaatggacaagagtggtatagtccccagctcccgtctcatcaatgacatcatcagattgttgttggaaaaaggcaacgaaaaaaatagcgcgctacaaaatatagcgaggcccttctccaaatgctacacaagttatagcgcgctaatagcatgctatatttcgaaa

SEQ ID NO: 2633 - DNA, 1002 bp, Triticum aestivum
  source 1..1002: mol_type = genomic DNA
atgaataggtcaagggcgatgaaggggttgaccgcggcgaggcgcgtcacggcgtcggtcgagacgacggctttgtccggcttgttgagcatgacgccggaggaggcctgtcaccgacaagtcttagacttggttataggcataggtgagaggcctgataccattacatttagttcactgattgacggatattgcttagtcgggaagacggaaaaagcattcaaaatacttgatgccatggaatcagttggtgttgagcctgatattgttacttacaatacactgcttgatggctattttaaaaacagaaggattgatgatgctttgactttgtttagagaaatgccgcgtaagagaattaaacctggcactgttacatatggcatcatgttggatgggttgtttcgtgctgggagaactgttgccgcaaagaaaatgttccatgagatgaacgagagtggaacaacggtggacatttccacatacgctataatacttggaggtttttgtagaaataattgtgcagacgaagctatcaccctattccacaaattaggtgcaatgaatgtgaagttcaatattgcaatagtcaataccatgatcaatgcaatgtacaaggttgggagaagagaagaagctaaggaactatttgctggaatattagcccgtgggttggtgcctaatgaatctacttacggagtaatgataaaaaatcttctaaaagatggagcagtggaagatgctaacaatgtgttttcatcaatggacaagagtggtatagtccccagctcccgtctcatcaatgacatcatcagattgttgttggaaaaaggtgagatcgccaaggccggatattatttgtctaaagttgatgggaagagcatatcacttgaagcttcaactacttcattgatgttttctctcttctcaaggaaaggcaaatataaggagaacatgaaattgctccctgccaagtatcaatttttcgatgtgttggttgac

SEQ ID NO: 2634 - DNA, 987 bp, Triticum aestivum; identical to SEQ ID NO: 2631
  source 1..987: mol_type = genomic DNA

SEQ ID NO: 2635 - DNA, 987 bp, Triticum aestivum; identical to SEQ ID NO: 2631
  source 1..987: mol_type = genomic DNA

SEQ ID NO: 2636 - DNA, 708 bp, Triticum aestivum
  source 1..708: mol_type = genomic DNA
atggactgctgctgccgcgcacaccgcctcgatctggcgttcgctttcttcggccgtctcctcaggacgggacttaaggcaggcgtcattcaagtttgcactcttctcaagggcctctgccgcgcaaagcgggctgatgaggctctcgacgtgctgcttcacaggatgcctgagctggggggctgcacccccaacgtggtggcgtataccacggtcatccacggcttctttaaggaaggccaaataagcaaggcatgctatctattccatgaaatggcgctgcagggcgttacacctgatgtggtgacatatagctcggttattgatgcgctgtgcaaggccagagccatggacaaggcagagtatttccttcgtcagatggttcataatggtgtcctacctaataatgtgacatataatagcctcatccatggatattcctcttcaggccattggaaggaggcggttagggtgctgaaagaaatgacaagtcaaggtatcataccggatatcgtttcataccgtattctgcttcatgggtatgccaccgaagggtgcttagttgatatgattaatctcttcaattcaatggcaagatactgtattctacctgattgtcatatcttcaacatactgattaatgcatatgctaaatctgggaagcttgataaggctatgcttatatttaaagaatgcagaaacaaggag

SEQ ID NO: 2637 - DNA, 945 bp, Triticum aestivum
  source 1..945: mol_type = genomic DNA
atggctcgcctctgctacaccacgcccatgccgcacctccgccgctgctgctcctcttccacctcgccgccttcacgccactgggacccccgacccgcctttgccgcggccacggagcgcgtccgcgccgggacgctcagccctgaagacgcacaccacctgtttgacgaattgctactgcaggccaaccccgtccccgagcgttccttcaacgacttccttgccgcgctcgcccgggctctgtcctccgctgctctcagagatggacactcccttgctctcggcatcttcaaccgtgtctgccgagaagaagcagggccgtgcgtgacgccacccacagtctgcacctacaacatcctcatggacagttgctgtcgtgcatgccacccgaacctaggccctgctttcttcggccgcttcctcaggacgggcctcaaggcagaccagatcgtcgccatcaacctcctcaagtgcctctgccacgcaaaacggaaggatgaggctgtcaacatgctgcttcataggatgtctgagttcggttgtgtgcctgatgccatctcatactccatagtacttaagagcttatgtgacgatagcaggagccagcaagcgctcgatctgctccagatggtaaggaaaggaggtgcctgctccctcgatgtggtggcatatagcacagtcatccgcagcttctttaaggagggtgaagtaagtaaggcatgcaatctattccatgaaatggtgcaacaagggattgtgcctaatgtggtgacatatagcttgattattgatgccttgtgcaaggtcagggcaatggacaaggcaaagctggtccttcagcagatggttgataatggtgttcgaccaaatatgtatacatgcatggaactcattcatgtactccctttgcaagaatggaggaagcaaagaagctgcagaattttt

SEQ ID NO: 2638 - DNA, 945 bp, Triticum aestivum; identical to SEQ ID NO: 2637
  source 1..945: mol_type = genomic DNA

SEQ ID NO: 2639 - DNA, 945 bp, Triticum aestivum; identical to SEQ ID NO: 2637
  source 1..945: mol_type = genomic DNA

SEQ ID NO: 2640 - DNA, 945 bp, Triticum aestivum; identical to SEQ ID NO: 2637
  source 1..945: mol_type = genomic DNA

SEQ ID NO: 2641 - DNA, 945 bp, Triticum aestivum
  source 1..945: mol_type = genomic DNA
atggctcgcctctgctacaccacgcccatgccgcacctccgccgctgctgctcctcttacacctcgccgccttcacgccactgggacccccgacccgcctttgccgcggccacggagcgcgtccgcgccgggacgctcagccctgaagacgcacaccacctgtttgacgaattgctactgcaggccaaccccgtccccgagcgttccttcaacgacttccttgccgcgctcgcccaggctctgtcctccgctgctctcagagatggacactcccttgctctcggcatcttcaaccgcgtctgccgagaagaagcagggccgtgcgtgacgccacccacagtctgcacctacaacatcctcatggacagttgctgtcgtgcatgccacccgaacctaggccctgctttcttcggccgcttcctcaggacgggcctcaaggcagaccagatcgtcgccatcaacctcctcaagtgcctctgccacgcaaaacggaaggatgaggctgtcaacatgctgcttcataggatgtctgagttcggttgtgtgcctgatgccatctcatactccatagtacttaagagcttatgtgacgatagcaggagccagcaagcgctcgatctgctccagatggtaaggaaaggaggtgcctgctccctcgatgtggtggcatatagcacagtcatccgcagcttctttaaggagggtgaagtaagtaaggcatgcaatctattccatgaaatggtgcaacaagggattgtgcctaatgtggtgacatataggttgattattgatgccttgtgcaaggtcagggcaatggacaaggcaaagctggtccttcagcagatggttgataatggtgttcgaccaaatatgtatacatgcatggaactcattcatgtaccccctttgcaagaatggaggaagcaaagaagctgcagaattttt

SEQ ID NO: 2642 - DNA, 945 bp, Triticum aestivum; identical to SEQ ID NO: 2637
  source 1..945: mol_type = genomic DNA

SEQ ID NO: 2643 - DNA, 945 bp, Triticum aestivum; identical to SEQ ID NO: 2637
  source 1..945: mol_type = genomic DNA

SEQ ID NO: 2644 - DNA, 1080 bp, Triticum aestivum
  source 1..1080: mol_type = genomic DNA
atgactgccaaaggccacagagctaatgttgtctcgtactgtattttgcttcatgggtatggcaatgaaggatgctttgctgatatgattgacctctttaattcaatggaaaggaatggcattgcagccgactgccgtgttttcaacatattaatcgatgcgtatgctaaacatggaatgacggatgaagctatgctcatatttacggaaatgcgggaaaaaggagcaggtcctgatgcgttcacctattccactgtaatagccgcactttccagaatgggtaggttgaccgatgctatgggcaagttcagtcagatgattgccatgggagttcaaccggacacaactgtttatcactccctgattcagggttgttgtttacatggtgatttggttaaagccaaggagctggtttgtgaaatgatgaacaaaggtattcctcgtcctagcattgtgttcttcaattcagtaataaacagtctgtgcaaagaaggaaggattatggatgcacacgatatctttgacttggttatagacataggtgagaggcctgatgccattacattcagttcactgattgacggatattgcttagtcggcaatatggataaagcattaaaagtacttgatgtcatggaatcagttggtgttgagcctaatgttattacatacaatacacttgttaatggctattgtagaaatggaaggatcgatgatagtttgactctgttcagagagatgccgcgtaagagaattaaacctgacactgtttcatattgcataataatgaatgggttgtttcgtgctgggagaactgttgccgcaagaaaaatgttccatgagatgacggaaaatggaataacagtgagtatttctacatacagtataatacttagaggtctttgtagaaataattgtgcagacgaagctatcaccctgttccagaaattaggaacaatgaatgtaaagtttgatattgcaatactcaataccatgattaatgcaatgtacaaaggttcaaagaaaggaagaagcaaaggaattgtttgctacaatatcagccaatgggttggtgcccaa

SEQ ID NO: 2645 - DNA, 1002 bp, Triticum aestivum
  source 1..1002: mol_type = genomic DNA
atggcaagtgttggtgttcaaccaaatgctgtcactttgaactcattaatcgattccctttgcaagcacagaaggacaaaggaagctagagaaatttttgactccatggccgcaaagggcctgaaacctaatatcgtctcctactctactatgcttaatgggtatgtcaaagaaggatgcttcgatgatatgactgatctcttcaattcgatggtacggaatggtatcgtacctaaccaccatattttcaacatactgatcaatgcatatgctaaacgtggagtgatggatgaggctatgcacatgttcgaagtaatgaggcaacaaggagtaaacccagatgtatttagctatcaaattgtaatggattcacttcgcaaaatgggcaggatggatgctgctctggacaaatttaatcagatggtcaatcaaggagtttcacctaacatagttgtttaccaatgcctggttctgggttcttgttctcatggtgattttgtgaaggccaaggaattgatttctgaagctgttaatagaggtctgtgttctaacagtgtgttcttctattctgtaataaatgacctgtgcaaagaaggaaaggtgaaggaggcacaggatatgtttcacttcattgtaggtattggtcagcggcctgatgtgattatgtacacttcactgatggatggatattgccttgttggcaaggtggaggaagcactgagagtacttggtgctatgaagtctgctggcctccaacctactgctgttacgtatggtatacttcttaatggctactgtaaaattggaaggatcgccgctggattgagtcttttcaaggaaatgtcactcagcggggttaagcccactactattttttttcgagaaaacgcaaaagagtttgcgtttcatttcattgaacaggaagagaacagcagtacaggtacaacctcccagaaggagggacacacgcacacacaccatcgtcctcaccagacaagcagg

SEQ ID NO: 2646 - DNA, 1143 bp, Triticum aestivum
  source 1..1143: mol_type = genomic DNA
atgctttttgcaaaaaagggtaggttggatgatgctgtgataaagtttaatcagatgattgatgcaggagtacgaccggacgcatctgtttatcgttccctaatccagggtttttgtacacatggcgatttggtgaaagcaaaggaatatgttactgaaatgatgaagaaaggtatgcttcctcctgatattatgttcttcagttcaatcatgcagaaactatgcacagaaggaagggtaatagaagcacgagatatccttgacttgatagtgcgcattggtatcaggcctgatgttttcatatttaatatactgatcggtggatactgcctagtccgcaagatggcagatgcatcaaaaatatttgatgatatggtgtcatatggtttagaaccttgtaatagtacgtatggtatacttattaatggctattgcaaaaacggaaggattgatgacgggctgattctgttcaaagaaatgttgcccaagggacttaaacctacaacttttaattacaacgtcatactggatggattatttctggctggacaaactgttgctgcaaaggagaagtttgatgagatggttgaatctggagtaagtgtgtgcatcgatacttactctatagttcttggtggactttgtagaaataattgtgccggtgaagcaatcacgctatttcagaaattaagcacaacgaatgtgaaattcgatattagaattgtcaatatcatgattgatgccttctaccgggttcggcgaaaccaggaagctaaggatttgtttgctgcagtatcagccaatggtttggtagctaatgtctttacctacaccgtaatgatgataaatcttatagaagaagggtcactggaagaagctgacactctctttttatcaatggagaggagcggctgtactgccaactcttatatgttaaatcatattatcagaaggttactggaaagaggagagatagtcaaggctggaaattatatgtcgaaagttgatgcaaagagctactcacttgaagctaaaactgtttcgctgctgatctccctctttttagggaaagggagatatagagaacacatgaaattgctccctatgaagtatcagtttctcgaagaagcagccacagttgaa

SEQ ID NO: 2647 - DNA, 1143 bp, Triticum aestivum; identical to SEQ ID NO: 2646
  source 1..1143: mol_type = genomic DNA

SEQ ID NO: 2648 - DNA, 1143 bp, Triticum aestivum; identical to SEQ ID NO: 2646
  source 1..1143: mol_type = genomic DNA

SEQ ID NO: 2649 - DNA, 1143 bp, Triticum aestivum; identical to SEQ ID NO: 2646
  source 1..1143: mol_type = genomic DNA

SEQ ID NO: 2650 - DNA, 999 bp, Triticum aestivum
  source 1..999: mol_type = genomic DNA
atggttgatgaagtaatgcatatatttacaaaaatgcggcagcaaggactgaaccctgatgtagagaactatggagcggtagtaaacttgctttccaagattggccgaatggatgatgctatgtcccaattcaatcaaatgataactgaagggttagctcctgatgtcatagttttcaccccccttattagtggtttctgttcttgtggcaaatgggagaaggttgatgaactattttctgagatgttggatcgcggcatctgtcccgacacagtgttcttcaacactgttatggatcacctttgcaaaaatggaagggttatagaagcccaagatgtgttcgacctgatggtacacatgggtgtgaagcctgatgtgcgtagtcatgtcacactgatgcatggatactttgcagatggtaagatggatgaaatgaggaagttacttgaaaatatgtgctcaattggcttgaaacctgatgttgtcacctatagcatactgatagatagttactctaagaatggaaggatagatgatgcactggttgttttcagggaaatgttggacggtgttaagccttctattatcacttttaatattatgattggtgtgttgcttaaaggtagcaggaaggaagaagccaaagatttgtttgacggtatctgggccaaaggattagtgcctgacgttgttacatatagcttaatgatacaaaacttaatagaagaaggttctctacaagagtctgatgatctattcatttctatggagaagaatggatgtgctgccaactcctgtatgctgaatgctatagttagaagcttacttcagaaagaggagattcttagggctgggacttatctgtctaaaattgatgagaggaggttcacccttgaagcttccactgctagcttgttgactgcacttgtgtcagggggggaaggccaggaatataaggagttactccatgaaaaatactctgaactgctaatcgaggcc

SEQ ID NO: 2651 - DNA, 1125 bp, Triticum aestivum
  source 1..1125: mol_type = genomic DNA
atgaccgccaagggcctcaaacctgatattgtcgtgtactgtactcttcttcacgggtatgctaccgaaggatgcctcgccgatatgatcaatctctttaattcaatggaagacaatggtattgtagccaactgcaaagttttcaccatattaattgatggatatgctaaatgtggaatgatagatgaagctatgctcatctttaccaaaatgcgagaacaaggagtgagtcctaatgtattcacctatgcaattgtaacagctgcactttgcagaatgggcaggctgtctgatgcaatggacaaactaaatgagatgattgcaatgggcttacaaccgaacaaggttgtttatcgctctctaattcagggcttttgtacacatggtgatttggtgaaagcaaaggtcttggtttctgaaatgatgaacaaaggtattcctcgtccaaatatggtgttcttcaactcagtaataaacagtctatgcaaggaaggaagggttacagatgcacacgatatcttcgacttggctataaacattggtgagaggcctgacgttattacatttaattcactgattgacggacattgtttagccgggaagatggataaagcattcggagtacttgatgccatggtatcagctggcattgagcccaatgttgtcacatacaatacacttattgatggctattctagaaagggaaggattgatgatgggttgaccctattcagagaaatgatgcctaacaaaattaaacctacaactgctacatatggcgccatacttcatgggttgtttcgtgctggcagaacttctcctgcgaagaaaatgttcaatgagatgattgaaagtgaaacaacagtgaacatttccatatatgctataattcttggaggactttgtagaaacaattgcgttgatgaagcaattgtcttgttcgagaaattaggtgcaatgaatgtgaagttggatgttggaatattcaatactatgattaatgcaatgtacgcggttaagggaagagaagaagctaaggatttgtttgctgcaatatcagccaatgggctggtacctaatgcgtcttcttatggtgttatgataacaaatcttctaagagaggat

SEQ ID NO: 2652 - DNA, 1080 bp, Triticum aestivum
  source 1..1080: mol_type = genomic DNA
atgagccgccgctttgtccccgtcgacagacgcatcttggagcggaacatcaaggctcggtaccacgccggagacattggcacccaggacgcactccacctgttcgacgaattgatccaggttgctgggccttcctcggtccgtgccatcaactgcctcctcaccgtcgtcggccgtgattgccctgcgctcggtgtctccctcttcaaccgcgtcgcaagaaccaaggtgcctccccacaatgtcacctatggcattctagttgactgctgctgccgtgctggccgcctggaccttggacacgctgccatgggacgcgtcattaagttgggatttacagcagaagctatcgtcaatttcagccacctactcaaggccatctgtgcagagaagaagaccagttatgcaatggacatcgtactccggataatgcccgagtttaactgcatgccaaacattttctcgtataacattcttttcaagggtctctgcaacgagaagagaagccaagaggctctcgacctgattcaaattatggttgaggatggaggttgctgccgacctgatgtggtgacctatagcactgtaattgatggcttgttgaaagagggtgaggtaggcaaggcttacaggctattttctgaaatgctacagagggggatttcgccaaatgctgtgacctatagctcaatcatctgtggcatgtgcaggcttcatctgatggacaaggctgaggaggttcttcaacagatgtttgatagagaaattctgccagatgttgctacatatactagtctaatacatggatattattcattaggacagtgcgaggaggtggatcggattttcaaagaaatgtctagaaatggtgttcaaccagatatcgtaacttataacatacagatggattatctttgcaagaatggaagatgcgcagaagctaggaagatttttgattccatggtcagtttgggccaaaaaccgactgttactacctacagcattctgcttcatgggtatgctatagaaagatttttgattccatgcccgggcgtcgacccgttggttgggcagctgggt

SEQ ID NO: 2653 - DNA, 1026 bp, Triticum aestivum
  source 1..1026: mol_type = genomic DNA
atgtcccgcatccacctccaccgctgcctctactcctccacctcgcggcccttgcgttcctggtctccccgcgccgcctttgccgcggcaacagagcgcgtccgcgctggggcgctcagccaagacgatgcacaccacctgttcgacgaattgctgcggcaggccaccccggtccccgggcgctccctcaacggcttccttgccgccctcgcccgtgcgccggcctccgaagtctgcagagatgggcccgccctcgccctcgccctcttcaatcgcgtctgtcgtgatgaagccggcgcgcctctcacagtccacacctacggcatcctcatgggctgctgctgccgtgggcatcgcccggacctagggcttgccttattcggtcgcctccacaggacgggcatcaagacaaaccagatcgccgtcaacaccttccttaagtgcctctgttacgcaaaacggacggatgaagctgtgaacgtgctgcttcataggatgtccgagctcggctgtgtgcctaatgccttctcatactccattgttctgaagagcttatgctacaatagcatgagtcagcgggcgctcgacctgctccagatgatggcgaaagaaggaggtgcctgctcccccaacgtggtgacatataccacggtcatccatggcctctttaaggaaggcgaaacaggcaaggcatgcaatctattccatgaaatgaagcagcaagggattgagcccaatgtggtgacatatacctcgagcattgatgcgttgtgcaaggccagagcaatggacaaggcagagctagtccttcggcagatggttgctaatggtgctcaacccaatgaagtgacatataattgcatgatccatggatattccacatcagggcagttgaaagaggctgctaaaatgttcagagaaatgacaagtcagggtcttataccagataactttacttgcagctcgttaatgacttccctttgcaagcatcaaagaagcaaagaagctgcagaaatttttatgcca

SEQ ID NO: 2654 - DNA, 1122 bp, Triticum aestivum
  source 1..1122: mol_type = genomic DNA
atgggtaggatggatgctgctctggacaaatttaatcagatggtcaatcaaggagtttcacctaacaaagctgtttaccaatgcctggttctgggttcttgttctcatggtcattttgtgaaagccaaggaattgatttctgaagcagttaatagaggtctgtgttctaacagtgtgttcttctatcctgtaataaacgacctgtgcaaagaaggaaaggtgaaggaggcacaggatatgtttgacttcattgtaggtattggtcagcggcctgatgtgattatgtacaattcactgatggatggatattgccttgttggcaaagtggaggaagcactgagagtacttgatgctatgaagtctgctggcctccaacctactgctgttacgtatggtatacttcttaatggctactgtaaaattggaaggattgccgctggattgagtcttttcatggaaatgtcactcagcggggttaagcccactactattatgtacaacattatacttgatgggctgtttcgctccgggagaacagattctgcaaaggaaaaattccgtacgatgagcgaaagtggcataccagtgggcattgacacatacaacatagttcttagtggactttgtaaaaataattgcgctggtgaagcaatagagctgttcaagaaactacgtgcaatgaatgtgaagattgatgtcaaaacactcactatcatgatttctgcaatgtttaaaagtaggagaattgaagaagccaaggagttgtttgctactatatcagccatcgggttggtgccttctgttgtgacttacagtgtaatgatgacgaatttcataaaagaagggtcgctggcagagactgatgatatgtttttagcaatggagaaggctagctgtgctcccgactccatcctgctaaatcaagtggtcagggcgttgctggaaaaaggtgcagttgtaaaggctgcaacttatctcgctaaacttgatgctaaacagctgtcagttgaagcttcaacgatttcgttaatagtatctctcttctcaggggaagggaaactaagggagcacgtagagttgcttccagtaaagtaccagcctcctgagagttcgactgacaat

SEQ ID NO: 2655 - DNA, 885 bp, Triticum aestivum
  source 1..885: mol_type = genomic DNA
atgtttgacttcattgtaggtattggtcagcggcctgatgtgattatgtacaattcactgatggatggatattgccttgttggcaaagtggaggaagcactgagagtacttgatgctatgaagtctgctggcctccaacctactgctgttacgtatggtatacttcttaatggctactgtaaaattggaaggattgccgctggattgagtcttttcatggaaatgtcactcagcggggttaagcccactactattatgtacaacattatacttgatgggctgtttcgctccgggaggacagattctgcaaaggaaaaattccgtacgatgagcgaaagtggcataccagtgggcattgacacatacaacatagttcttagtggactttgtaaaaataattgcgctggtgaagcaatagagctgttcaagaaactacgtgcaatgaatgtgaagattgatgtcaaaacactcactatcatgatttctgcaatgtttaaaagtaggagaattgaagaagccaaggagttgtttgctactatatcagccatcgggttggtgccttctgttgtgacttacagtgtaatgatgacgaatttcataaaagaagggtcgctggcagagactgatgatatgtttttagcaatggagaaggctagctgtgctcccgactccatcctgctaaatcaagtggtcagggcgttgctggaaaaaggtgcagttgtaaaggctgcaacttatctcgctaaacttgatgctaaacagctgtcagttgaagcttcaacgatttcgttaatagtatctctcttctcaggggaagggaaactaagggagcacgtagagttgcttccagtaaagtaccagcctcctgagagttcgactgacaat

SEQ ID NO: 2656 - DNA, 1122 bp, Triticum aestivum; identical to SEQ ID NO: 2654
  source 1..1122: mol_type = genomic DNA

SEQ ID NO: 2657 - DNA, 1110 bp, Triticum aestivum
  source 1..1110: mol_type = genomic DNA
atgataagtcttggtgttgtaccaaatgctatcatgtggaactcatttatggattcactttgcaagcatagaaggacaaaggaagctagagacatttttgactccatggctgcaaagggccaaaaacctgatattttctcctattctactatgcttaacgggtatgcgaaagaaggatgctttgatgatatgacttgtctcttgaatttgatgctacagaatggtgttgtacctaaccaccatattttcaacatactgatcaatgcatatgctaaacctggactgatggatgaggctatgcacatgtttgaagtaatgaggcaacaaggagtaaacccggatgtatttgactatcaaatcataatggattcactttataaaatgggtaggatggatgctactctggacaaatttaatcagatggtcaatcaaggagtttcacctaacaaagctgtttaccaatgcctggttctgggttcttgttttcatggtcattttctaaaagccaaggaattgatttctgaagcagttaatagaggtatgtgttctaacagcatgttcttctatcctgtaataaacgacctgtgcaaaggaaaggtagaggaggcacaggatatttttgacttcattttaggtattggtcagcggcctgatgtgactatgtacaattcactgatggatggatattgccttgttggcaaggtggaggaagcactgagagtacttgatgctatgaagtctgctggcctccaacctgatgctattacgtatgctatacttcttaatggctactgtaaaattggcaagatcaccgacggattgagtcttttcagggaaatgtcactcagcggggtaaagcccacaactattatgtacaacattatacttgacgggctgttttgctccgggagaacagtttctgcaaaggaaaaattcaatacgatggttgaaagtggcttaccagtggacgtttgcacatacaacatagttctctgtggactttataaaaacaattgcactggtgaagcaatagagttgttcaagaaactacgtgctataaacatgaagattgatgtcataatactcaataccataatttctttaattttt

SEQ ID NO: 2658 - DNA, 1053 bp, Triticum aestivum
  source 1..1053: mol_type = genomic DNA
atggaaaaatcttttcatgatatgcattgtctcattgatttgatggtagaaaatggtattgcaccagatcatcatgtctacaacatactcatatctgcatgtgctcaagaagaaatggttagtgacgtaatgcatatatttacaaaaatgcggcagcaaggattgaaccctaatgtagcgaactatggagtggttgtaaacttgctttgcagcatgggccgaatggatgatgctatgtaccaatacaatcaaatgataaccgaaggattagatcctgatatcatagttttcagcacccttataagtggtttttgttcttgtggcgcatgggagagggttcatgaaatattttctgaaatgttgaatcgtggcatctatcctgataccgtgttcttcaacataattatggaccacctttgcaaagagggaagggttatggaagcccaggatatcttcgacctgatggtacacatgggtgtgaagccttttgtccgtgattacaacacactgatacatggatactgtttagttggtaagatggacgaagggaggaagttacttgacaatatgtgctcaattggcttgaaaccggatgatttcacctatagcatactgattgatggttactctatgaagggaaggatagatgatgcattgattgttgtcagggaattgttggacgggaaggttggaccttctattatcacttttaatattatgattgttgcgttgcttaaaggtgggagaaaggaagaagccaaagatttgtttgatggtatctgggccaaaggattagtgcccgatgttgttacatatagcttaatgatacaaaaacttatagaagaaggttctctacaagagtctgatgatctattcctttctatggagaagaatggatgtgctgccgattcccgcatgctaaatgatatagttagaagcttacttcagaaagggacaatgcaagtatcaatggagtatgcaacggaggcaagcctagcaaggttgccattcaaaatatatcatgcactcagggaagcaacgaaaatgccatca

SEQ ID NO: 2659 - DNA, 675 bp, Triticum aestivum
  source 1..675: mol_type = genomic DNA
atgatgagcaaaggtattcctcgtcccaacattgtgttcttcaattcagttataaactatttatgcaaagaaggaagggttatggatgcacaagatatctttgaatttattataagcatagatgagagacctgatgtcattacatttaactcgctgattgacggatattgcttagtcagcaagatggataaagcatctggagtacttgatgccatggtatcagctggcattgagcctaatgttgttacatataatacacttgttagtggctattctataaatagaaggatcgatgatggtttgactctgtttaggcaaatgccacttaagagaataaaacctgacagtgttacatatggcatcatactggatgggttttttcgtgctgggagaactgttgctgcaaggaaaatgttccatgagatgatcgaaaggggtataccagtgaccatttccatatacaatagaatacttggaggtctctgtagaaataattgtgcagacgaagccatcgcactattccagaaattaggagcaatgaatgtgaagttcgatattataacacttaataccatgattaatgcatgttcaaggttcgaagaagagaagaagctaacgatttgtttgctgcaatatcagccagtgggttggtgcctaatgcttctacttacggca

SEQ ID NO: 2660 - DNA, 975 bp, Triticum aestivum
  source 1..975: mol_type = genomic DNA
atgatgagcaaaggtattcctcgtcccaacattgtgttcttcaattcagttataaactatttatgcaaagaaggaagggttatggatgcacaagatatctttgaatttattataagcatagatgagagacctgatgtcattacatttaactcgctgattgacggatattgcttagtcagcaagatggataaagcatctggagtacttgatgccatggtatcagctggcattgagcctaatgttgttacatataatacacttgttagtggctattctataaatagaaggatcgatgatggtttgactctgtttaggcaaatgccacttaagagaataaaacctgacagtgttacatatggcatcatactggatgggttttttcgtgctgggagaactgttgctgcaaggaaaatgttccatgagatgatcgaaaggggtataccagtgaccatttccatatacaatagaatacttggagatctttgtagaaataattgtgcagacgaagccatcgcactattccagaaattaggagcaatgaatgtgaagttcgatattataacactcaataccatgattaatgcaatgttcaaggttcgaagaagagaagaagctaacgatttgtttgctgcaatatcagccagtgggttggtgcctaatgcttctacttacggcataatgataaaaaatattctaaaggaaggatcagtggaagaaattgacaatatgttttcatcaatggagaagagtggtatagttcccagctctcatcttataaatgatattataagaatgttgttggaaaaaggtgagattgccagggccggatattatttgttgaaagttgatgggaagaacaccttgcttgaagcttcaactacttcactgatgttgtccctcttttctagggaagggaaatatcaggaggacgtgaaattgctccctgcaaagtatcaatttttctatggatttggt

SEQ ID NO: 2661 - DNA, 975 bp, Triticum aestivum; identical to SEQ ID NO: 2660
  source 1..975: mol_type = genomic DNA

SEQ ID NO: 2662 - DNA, 675 bp, Triticum aestivum; identical to SEQ ID NO: 2659
  source 1..675: mol_type = genomic DNA

SEQ ID NO: 2663 - DNA, 975 bp, Triticum aestivum; identical to SEQ ID NO: 2660
  source 1..975: mol_type = genomic DNA

SEQ ID NO: 2664 - DNA, 975 bp, Triticum aestivum; identical to SEQ ID NO: 2660
  source 1..975: mol_type = genomic DNA

SEQ ID NO: 2665 - DNA, 1074 bp, Triticum aestivum
  source 1..1074: mol_type = genomic DNA
atgataatggtatttcaccagatcattatggctacaacatactcatatctgcttatgctaaagaaaaaaatggttgatgatgtattgcatatatttacaaaaatgcggcagcaaggattgaaccctgatgttgcgaactatggagcggtaataaacttgctttctagtattggccgaatggatgatgctatgtcccaatacaatcaaatgataaatgaagggttagctcctgatatcatagttttcaactcccttattagtggtttctgttcttgtggcaaatgggagaaggttcatgaactattttctgagatgttggatcgcggcatctgtcccaacacagtgttcttcaccactattatggaccgcctttgcaaaaatggaagggttatggaagcccaagatctcttcgacctgatggtacacatgggtgtgaagcctgatgtgtggacttataacacactgataggtggatacttgttcattggtaagatggatgaagtgagcaagttacttgacaatatgtgctcaattggcttgaaaccaaatgttttcacctatggcatactgatcgatggttactctaagaatggaagtatagatgatgcactggttgttatcagggaaatgttggacggtgttaagccttctattatcacttttaatattatgattggtgtgttgcttaaaggtagcaggatggaagaagccaaagatttgtttgacggtatctgggccaaaggattagtgcctgacgttgttacatatagcttaatgatacaaaaactaatagaagaaggttctctacaagagtctgatgatctattcgtttctatggagaagaatggctgtgctgccgactcctgtatgctaaatgctatagttagaaggttacttcagaaaggggagattcttatggctgggacttatctgtctaaaattgatgagagaagattcagctttgaagcttccacagctagcttgttggctgcacttgtgtcaggggggaaaggccaggaatataaggagttactccccgaaaaataccactattttctggaacagggcactgat

SEQ ID NO: 2666 - DNA, 1074 bp, Triticum aestivum; identical to SEQ ID NO: 2665
  source 1..1074: mol_type = genomic DNA

SEQ ID NO: 2667 - DNA, 1032 bp, Triticum aestivum
  source 1..1032: mol_type = genomic DNA
atggcaaaaggagatgattgctccccctgtgtgctgtcatatagcacggtcatccatggcttctttaaggaaggggaagtaggcatggcatgcaatctattccatgaaatgacccagcaaggggttgtgcctaatgtggtgacatataactcgattatcgatgcaatgtgcaaggcaggagcaatggacaagacggagctggtccttcggcaaatggttgataatggtgtccgaccggataaagtaatatataatagtatgatccatggatattcaactttgggccggtggaaagaggcgggtaaaatgttcagagaaatgacaagccggggtcttataccagatattttcacttggaactcgttcatgggctccctttgcaagcatggaagaagcaaagaagctgcagaaattttcttttccatggccgcaaagggctacaaaactaatattgtctcctacattgctcttcttcgtgtgtatgccaatgaaggaagctttgctgatatgatgagtctatttaattcaatggaaggcaacggtattgtagccaactgccaagttttcaccatattaattgatgcatatgctaaacaaggaatgattgatgaagctatgctcatacttactgacatgcggggacaaggactgagtccggatgtattcacctattcaactctaatatctgcactttgcagaatgggtaggctggctgatgctatggataagttcagtcagatgattggcatgggagtacaaccgaacacagttgtttatcactccctagttcagggcttatgtacacatggtgatttggcgaaagcggaggagttagtttctgaaatgatgaataaaggtattgctcgtccaaacaaatcgttagcttcttcctttttgtatcattactccataagtggaagcattaggcgggttggtgccaaccctgcgtatatccgtgtatctatttgccagcatatatccgtgtgtgacaaccctgcggagacaatccgttgcagttgtcatccttctttt

SEQ ID NO: 2668 - DNA, 975 bp, Triticum aestivum
  source 1..975: mol_type = genomic DNA
atgatgaacaaaggtattcctcgtcctagcattgtgttcttcaattcagtaataaacagtctgtgcaaagaaggaaggattatggatgcacacgatatctttgacttggttatagacataggtgagaggcctgatgccattacattcagttcactgattgacggatattgcttagtcggcaatatggataaagcattaaaagtacttgatgtcatggaatcagttggtgttgagcctaatgttattacatacaatacacttgttaatggctattgtagaaatggaaggatcgatgatagtttgactctgttcagagagatgccgcgtaagagaattaaacctgacactgtttcatattgcataataatgaatgggttgtttcgtgctgggagaactgttgccgcaagaaaaatgttccatgagatgacggaaaatggaataacagtgagtatttctacatacagtataatacttagaggtctttgtagaaataattgtgcagacgaagctatcaccctgttccagaaattaggaacaatgaatgtaaagtttgatattgcaatactcaataccatgattaatgcaatgtacaaggttgggagaagagaagaagctaaggatttgtttgctgcaatatcacacagtggcttggtgcccaatgaatctacttataaggtaatgataaaaaatcttctaaaagacggagcagtggaagatgctgacaatatgttttcatcaatggacaacagtggtatcgttcccagttcccttcttataaatgatatcatcagaatgttgttggaaaaaggtgagatagccaaggctggaaattatttgtctaaagttgatgggaagagtatctcacttgaagcttcaactgcctcattgatgttgtctctcttttcaaggaaagggaaacatcaggaggatattaagttgctccctgcaaagtatcaatttttcgatgggtttggt

SEQ ID NO: 2669 - DNA, 975 bp, Triticum aestivum; identical to SEQ ID NO: 2668
  source 1..975: mol_type = genomic DNA

SEQ ID NO: 2670 - DNA, 975 bp, Triticum aestivum; identical to SEQ ID NO: 2668
  source 1..975: mol_type = genomic DNA

SEQ ID NO: 2671 - DNA, 975 bp, Triticum aestivum; identical to SEQ ID NO: 2668
  source 1..975: mol_type = genomic DNA

SEQ ID NO: 2672 - DNA, 975 bp, Triticum aestivum; identical to SEQ ID NO: 2668
  source 1..975: mol_type = genomic DNA

SEQ ID NO: 2673 - DNA, 975 bp, Triticum aestivum; identical to SEQ ID NO: 2668
  source 1..975: mol_type = genomic DNA

SEQ ID NO: 2674 - DNA, 759 bp, Triticum aestivum
  source 1..759: mol_type = genomic DNA
atgattattgtacacatggtgattgtacacatggttaaaaaaactctaattcagggttattgtacacatggtgatttggtgaaagcaatgggattggtttctgaaatgattaacagaggtattcctcctccagacattgtgttctttaattcagtaataaatagtctatgcaaagaaggaagggttacagatgcacaagatacctttgacttggttatatactttggtgagaggcccgacatctttacatttaactcgctgattgacggatattgcttagttggtgagatggagaaggctttcggagtacttgataccatggcatcaggtgggattgagcctgatagtatttcatataatacaattgttaatggatattttaaaaatgataggattgatgatggattggccttattccgagaaatgctgaagaaagttaaacctacaactgttacatataacatcatactggatgggttatttggtgctgggaaaacagttgctgcgaagaaaacgttccatgagatgatcgaaagtggaataacagtgagcatatccacatacaggataatccttggtggactttgcaggaatagttgtgatgatgaagcgatcaccctgttccagaaattaggagcaatgaatgtcaagttggatattacaatactcaataccatgatcaatgcactgttcaaggttcagagaagagaagaagctaacaatttgtttgctacagtatcagccagtgttgattgtttt

SEQ ID NO: 2675 - DNA, 990 bp, Triticum aestivum
  source 1..990: mol_type = genomic DNA
atgagattggtttctgaaatgattaacagaggtattcctcctccagacattgtgttctttaattcagtaataaatagtctatgcaaagaaggaagggttacagatgcacaagatatctttgacttggttacatactttggtgagaggcccgacatctttacatttaactcgctgattgacggatattgcttagttggtgagatggagaaggctttcggagtacttgataccatggcatcaggtgggattgagcctgatagtatttcatataatacaattgttaatggatattttaaaaatgataggattgatgatggattggccttattccgagaaatgctgaagaaagttaaacctacaactgttacatataacatcatactggatgggttatttggtgctgggaaaacagttgctgcgaagaaaacgttccatgagatgatcgaaagtggaataacagtgagcatttccacatacaggataatccttggtggactttgcaggaatagttgtgatgatgaagcgatcaccctgttccagaaattaggagcaatgaatgtcaagttggatattacaatactcaataccatgatcaatgcactgttcaaggttcagagaagagaagaagctaacaatttgtttgctgcagtatcagccagtggattggtacctaatgcttatacctattgcataatgataacaaatctaataaaagaaggatcagtggaagaagctgaaaatatgttcttattaatggagaagagcagttgtgctccggactctcgtcttataaactgtatcatcagaatattattggaaaaaggtgagattgtcaaggctggaaattatatgtctaaagttgatggcaagagcatctcacttgaagcttcaactacttcgttgttgatacatctctttgcaagtaaagggaaatatcaggaacagataaatttactccctgtaaagtaccgatttttcgaaggagtcagt

SEQ ID NO: 2676 - DNA, 990 bp, Triticum aestivum; identical to SEQ ID NO: 2675
  source 1..990: mol_type = genomic DNA

SEQ ID NO: 2677 - DNA, 990 bp, Triticum aestivum; identical to SEQ ID NO: 2675
  source 1..990: mol_type = genomic DNA

SEQ ID NO: 2678 - DNA, 759 bp, Triticum aestivum; identical to SEQ ID NO: 2674
  source 1..759: mol_type = genomic DNA

SEQ ID NO: 2679 - DNA, 990 bp, Triticum aestivum; identical to SEQ ID NO: 2675
  source 1..990: mol_type = genomic DNA

SEQ ID NO: 2680 - DNA, 972 bp, Triticum aestivum
  source 1..972: mol_type = genomic DNA
atgatgaacagaggtattcctcgtccaaacattgtgttcaattcagtaataaacagtctgtgcaaagaaggaagggttatggatgcacatgatgtcttagacttggttataggcataggtgagaggcctaatgtcattacatttaattcactgattgacggatattgcttagtcgggaacatggataaagcattcaaaatacttgatgtcatggaatcagttggtgttgagcctaatgttgttacttatagtgcacttcttgatggctattctaaaaacagaaggattgatgatgctctgactttgtttagagaaatgccgcgtaagagaattaagcctgacactgttacatatggcatcatgttggatgggttgtttcgtgccgggagaactgtcgctgcaatggaaatgttccatgagatgactgaaagtggaacaacagtggacattgtcatatacaatataatacttggaggtctttgtagaaataattgtgtagatgaagcgattgcactgttccagaaattgcgagcaatgaatgtgaagttcaatattgaaatactcaataccatgattaatgcaatgtacaaggttcaaagaaaggaagaagcaaaggaattgtttgctacaatatcagccaatgggttggtgcccaatgaatctacttatgcagtaatgataagaaatcttctaagaggcggagcagtggaagatgctgacaatatgttttcatcaatggacaacagtggcatcgttcccagttccggtcttataaatgatatcatcagaatgttgttgaaaaaaggtgagatagccaaggctggcaattatttgtctaaagttgacgggaagagtatctcacttgaagcttcaactaccgcattgttgttgtctctcttttcaaggaaagggaaacatcaggtggatattaagttgctccctgcaaagtatcaattttttgatggatttggt

SEQ ID NO: 2681 - DNA, 1038 bp, Triticum aestivum
  source 1..1038: mol_type = genomic DNA
atgccgcgccttcaggtccgctctttctgcagctccttctcctcacgcgcctacgacctgctgaacgaactccaaggccatctggactccaggacgctcagaccagagctcgcgcgccaactgttcgacgaaatgctgcgccaaccagtcccagtaacggcgcgtgcactcaacggcttatttgctgcgctcgcgcgtgcgccgccttcaaccgcctgcactgatggccctgcgctcgccgtcgatctcttcaaccatatggcccgagcaggccgccgccggatgacaggacccaccgttcacacttacaacatactaattgactgctgccaccgagcatgccgcccagacctagggcctgccttctttggctgcctcctcaagacaggcatcacaatgagcgccattacctacagcagcctattcaagttcctctgtgacatgaggcgcacaaaggaggctctgaacgtgctgctccataggatgcccgatgacctgcctaatgtcatctcctactcagtgattctcaagagtttctgcgacagtgggaggagccagcttgcgcttgacctgctccgggtgatggccaaaaaaggtggtgaccactctcccgacgtgatggcatacaacatggtaatggatggcttgtttaaggagggtgaagtaagcaaagcatgtgatctattccacgaaatgatacaacagggggttgtgcctaatgaggtgacatatagctccataatcaatgcgctatgcaaagcaagagcaatggataaggcagaggtgatccttcgacacatggttcgtaatggtgtccaaccacatgatagtaggatatataataccctgatccatggatttttaacttcggatcagctgaaagaagcctttaggttgttgaaagtaatgagaagccatggtagtatgccaaacgttgttacttgcacctcagtcatggactacctttgcaagcatggaagaatcaaagaagctgaggaaatattttattccatggccgtgaatggccgaaaccaaata

SEQ ID NO: 2682 - DNA, 1035 bp, Triticum aestivum
  source 1..1035: mol_type = genomic DNA
atgccgcgccttcaggtccgctctttctgcagctccttctcctcacgcgcctacgacctgctgaacgaactccaaggccatctggactccaggacgctcagaccagagctcgcgcgccaactgttcgacgaaatgctgcgccaaccagtcccagtaacggcgcgtgcactcaacggcttatttgctgcgctcgcgcgtgcgccgccttcaaccgcctgcactgatggccctgcgctcgccgtcgatctcttcaaccatatggcccgagcaggccgccgccggatgacaggacccaccgttcacacttacaacatactaattgactgctgccaccgagcatgccgcccagacctagggcctgccttctttggctgcctcctcaagacaggcatcacaatgagcgccattacctacagcagcctattcaagttcctctgtgacatgaggcgcacaaaggaggctctgaacgtgctgctccataggatgcccgatgacctgcctaatgtcatctcctactcagtgattctcaagagtttctgcgacagtgggaggagccagcttgcgcttgaccttctccgggtgatggccaaaaaaggtggtgaccactctcctgacgtgatggcatacaacatggtaatggatggcttgtttaaggagggtgaagtaagcaaagcatgtgatctattccacgaaatgatacaacagggggttgtgcctaatgaggtgacatatagctccataatcaatgcgctatgcaaagcaagagcaatggataaggcagaggtgatccttcgacacatggttcgtaatggtgtccaaccacatgataggatatataataccctgatccatggatttttaacttcggatcagctgaaagaagcctttaggttgttgaaagtaatgagaagccaaggtagtatgccaaacgttgttacttgcacctcagtcatggactacctttgcaagcatggaagaatcaaagaagctgaggaaatattttattccatggccgtgaatggccgaaaccaaata

SEQ ID NO: 2683 - DNA, 1035 bp, Triticum aestivum
  source 1..1035: mol_type = genomic DNA
atgccgcgccttcaggtccgctctttctgcagctccttctcctcacgcgcctacgacctgctgaacgaactccaaggccatctggactccaggacgctcagaccagagctcgcgcgccaactgttcgacgaaatgctgcgccaaccagtcccagtatcggcgcgtgcactcaacggcttatttgctgcactcgcgcgtgcgccgccttcaaccgcctgcactgatggccctgcgctcgcggtcgatctcttcaaccatatggcccgagcaggccgccgccggatgacaggacccaccgttcacacttacaacatactaattgactgctgccaccgagcatgccgcccagacctagggcctgccttctttggctgcctcctcaagacaggcatcacaatgagcgccattacctacagcagcctattcaagttcctctgtgacatgaggcgcacaaaggaggctctgaacgtgctgctccataggatgcccgatgacctgcctaatgtcatctcctactcagtgattctcaagagtttctgcgacagtgggaggagccagcttgcgcttgacctgctccgggtgatggccaaaaaaggtggtgaccactctcccgacgtgatggcatacaacatggtaatggatggcttgtttaaggagggtgaagtaagcaaagcatgtgatctattccacgaaatgatacaacagggggttgtgcctaatgaggtgacatatagctccataatcaatgcgctatgcaaagcaagagcaatggataaggcagaggtgatccttcgacacatggttcgtaatggtgtccaaccacatgataggatatataataccctgatccatggatttttaacttcggatcagctgaaagaagcctttaggttgttgaaagtaatgagaagccaaggtagtatgccaaacgttgttacttgcacctcagtcatggactacctttgcaagcatggaagaatcaaagaagctgaggaaatattttattccatggccgtgaatggccgaaaccaaata

SEQ ID NO: 2684 - DNA, 1035 bp, Triticum aestivum
  source 1..1035: mol_type = genomic DNA
atgccgcgccttcaggtccgctctttctgcagctccttctcctcacgcgcctacgacctgctgaacgaactccaaggccatctggactccaggacgctcagaccagagctcgcgcgccaactgttcgacgaaatgctgcgccaaccagtcccagtaacggcgcgtgcactcaacggcttatttgctgcgctcgcgcgtgcgccgccttcaaccgcctgcactgatggccctgcgctcgccgtcgatctcttcaaccatatggcccgagcaggccgccgccggatgacaggacccaccgttcacacttacaacatactaattgactgctgccaccgagcatgccgcccagacctagggcctgccttctttggctgcctcctcaagacaggcatcacaatgagcgccattacctacagcagcctattcaagttcctctgtgacatgaggcgcacaaaggaggctctgaacgtgctgctccataggatgcccgatgacctgcctaatgtcatctcctactcagtgattctcaagagtttctgcgacagtgggaggagccagcttgcgcttgaccttctccgggtgatggccaaaaaaggtggtgaccactctcccgacgtgatggcatacaacatggtaatggatggcttgtttaaggagggtgaagtaagcaaagcatgtgatctattccacgaaatgatacaacagggggttgtgcctaatgaggtgacatatagctccataatcaatgcgctatgcaaagcaagagcaatggataaggcagaggtgatccttcgacacatggttcgtaatggtgtccaaccacatgataggatatataataccctgatccatggatttttaacttcggatcagctgaaagaagcctttaggttgttgaaagtaatgagaagccaaggtagtatgccaaacgttgttacttgcacctcagtcatggactacctttgcaagcatggaagaatcaaagaagctgaggaaatattttattccatggccgtgaatggccgaaaccaaata

SEQ ID NO: 2685 - DNA, 1035 bp, Triticum aestivum; identical to SEQ ID NO: 2683
  source 1..1035: mol_type = genomic DNA

SEQ ID NO: 2686 - DNA, 903 bp, Triticum aestivum
  source 1..903: mol_type = genomic DNA
atgctgcgccaaccagtcccagtatcggcgcgtgcactcaacggcttatttgctgcactcgcgcgtgcgccgccttcaaccgcctgcactgatggccctgcgctcgccgtcgatctcttcaaccatatggcccgagcaggccgccgccggatgacaggacccaccgttcacacttacaacatactaattgactgctgccaccgagcatgccgcccagacctagggcctgccttctttggctgcctcctcaagacaggcatcacaatgagcgccattacctacagcagcctattcaagttcctctgtgacatgaggcgcacaaaggaggctctgaacgtgctgctccataggatgcccgatgacctgcctaatgtcatctcctactcagtgattctcaagagtttctgcgacagtgggaggagccagcttgcgcttgaccttctccgggtgatggccaaaaaaggtggtgaccactctcccgacgtgatggcatacaacatggtaatggatggcttgtttaaggagggtgaagtaagcaaagcatgtgatctattccacgaaatgatacaacagggggttgtgcctaatgaggtgacatatagctccataatcaatgcgctatgcaaagcaagagcaatggataaggcagaggtgatccttcgacacatggttcgtaatggtgtccaaccacatgataggatatataataccctgatccatggatttttaacttcggatcagctgaaagaagcctttaggttgttgaaagtaatgagaagccaaggtagtatgccaaacgttgttacttgcacctcagtcatggactacctttgcaagcatggaagaatcaaagaagctgaggaaatattttattccatggccgtgaatggccgaaaccaaata

SEQ ID NO: 2687 - DNA, 1035 bp, Triticum aestivum
  source 1..1035: mol_type = genomic DNA
atgccgcgccttcaggtccgctctttctgcagctccttctcctcacgcgcctacgacctgctgaacgaactccaaggccatctggactccaggacgctcagaccagagctcgcgcgccaactgttcgacgaaatgctgcgccaaccagtcccagtatcggcgcgtgcactcaacggcttatttgctgcactcgcgcgtgcgccgccttcaaccgcctgcactgatggccctgcgctcgccgtcgatctcttcaaccatatggcccgagcaggccgccgccggatgacaggacccaccgttcacacttacaacatactaattgactgctgccaccgagcatgccgcccagacctagggcctgccttctttggctgcctcctcaagacaggcatcacaatgagcgccattacctacagcagcctattcaagttcctctgtgacatgaggcgcacaaaggaggctctgaacgtgctgctccataggatgcccgatgacctgcctaatgtcatctcctactcagtgattctcaagagtttctgcgacagtgggaggagccagcttgcgcttgaccttctccgggtgatggccaaaaaaggtggtgaccactctcctgacgtgatggcatacaacatggtaatggatggcttgtttaaggagggtgaagtaagcaaagcatgtgatctattccacgaaatgatacaacagggggttgtgcctaatgaggtgacatatagctccataatcaatgcgctatgcaaagcaagagcaatggataaggcagaggtgatccttcgacacatggttcgtaatggtgtccaaccacatgataggatatataataccctgatccatggatttttaacttcggatcagctgaaagaagcctttaggttgttgaaagtaatgagaagccaaggtagtatgccaaacgttgttacttgcacctcagtcatggactacctttgcaagcatggaagaatcaaagaagctgaggaaatattttattccatggccgtgaatggccgaaaccaaata

SEQ ID NO: 2688 - DNA, 1038 bp, Triticum aestivum
  source 1..1038: mol_type = genomic DNA
atgccgcgccttcaggtccgctctttctgcagctccttctcctcacgcgcctacgacctgctgaacgaactccaaggccatctggactccaggacgctcagaccagagctcgcgcgccaactgttcgacgaaatgctgcgccaaccagtcccagtatcggcgcgtgcactcaacggcttatttgctgcactcgcgcgtgcgccgccttcaaccgcctgcactgatggccctgcgctcgccgtcgatctcttcaaccatatggcccgagcaggccgccgccggatgacaggacccaccgttcacacttacaacatactaattgactgctgccaccgagcatgccgcccagacctagggcctgccttctttggctgcctcctcaagacaggcatcacaatgagcgccattacctacagcagcctattcaagttcctctgtgacatgaggcgcacaaaggaggctctgaacgtgctgctccataggatgcccgatgacctgcctaatgtcatctcctactcagtgattctcaagagtttctgcgacagtgggaggagccagcttgcgcttgacctgctccgggtgatggccaaaaaaggtggtgaccactctcccgacgtgatggcatacaacatggtaatggatggcttgtttaaggagggtgaagtaagcaaagcatgtgatctattccacgaaatgatacaacagggggttgtgcctaatgaggtgacatatagctccataatcaatgcgctatgcaaagcaagagcaatggataaggcagaggtgatccttcgacacatggttcgtaatggtgtccaaccacatgatagtaggatatataataccctgatccatggatttttaacttcggatcagctgaaagaagcctttaggttgttgaaagtaatgagaagccatggtagtatgccaaacgttgttacttgcacctcagtcatggactacctttgcaagcatggaagaatcaaagaagctgaggaaatattttattccatggccgtgaatggccgaaaccaaata

SEQ ID NO: 2689 - DNA, 1038 bp, Triticum aestivum; identical to SEQ ID NO: 2688
  source 1..1038: mol_type = genomic DNA

SEQ ID NO: 2690 - DNA, 639 bp, Triticum aestivum
  source 1..639: mol_type = genomic DNA
atgagcgccattacctacagcagcctattcaagttcctctgtgacatgaggcgcacaaaggaggctctgaacgtgctgctccataggatgcccgatgacctgcctaatgtcatctcctactcagtgattctcaagagtttctgcgacagtgggaggagccagcttgcgcttgaccttctccgggtgatggccaaaaaaggtggtgaccactctcccgacgtgatggcatacaacatggtaatggatggcttgtttaaggagggtgaagtaagcaaagcatgtgatctattccacgaaatgatacaacagggggttgtgcctaatgaggtgacatatagctccataatcaatgcgctatgcaaagcaagagcaatggataaggcagaggtgatccttcgacacatggttcgtaatggtgtccaaccacatgataggatatataataccctgatccatggatttttaacttcggatcagctgaaagaagcctttaggttgttgaaagtaatgagaagccaaggtagtatgccaaacgttgttacttgcacctcagtcatggactacctttgcaagcatggaagaatcaaagaagctgaggaaatattttattccatggccgtgaatggccgaaaccaaata

SEQ ID NO: 2691 - DNA, 1035 bp, Triticum aestivum; identical to SEQ ID NO: 2684
  source 1..1035: mol_type = genomic DNA

SEQ ID NO: 2692 - DNA, 1035 bp, Triticum aestivum; identical to SEQ ID NO: 2687
  source 1..1035: mol_type = genomic DNA

SEQ ID NO: 2693 - DNA, 1038 bp, Triticum aestivum; identical to SEQ ID NO: 2688
  source 1..1038: mol_type = genomic DNA

SEQ ID NO: 2694 - DNA, 975 bp, Triticum aestivum
  source 1..975: mol_type = genomic DNA
atgatgaacaaaggtattcctcgtcctgacattgcgttcttcacttcaataataaatagtctatgcaaagaaggaagggttatggatgcacaaaatatctttgacttgcttgttgccatagatgagaggcctaatgtcattacatttaattcactaattgacggatattgcttagttggcgagatggataaagtattcagagtacttgatgccatgaaatcagttggtgctgagcctgatattgttacatacaatacacttgttaatggctattgtagaaatggaaggattgacgatgacttggctttgttcagggaaatgccatgtaagggaataaaacctgacactgttgcatattgcatcatactagatgggttgtttcatgccgggagaattgtcgttgcaaggaaaatgttccatgagatgatcgaaagtggaacaacagtgggcattcccatatacaatataacacttaaaggcctttctagaaataactgtgcacacgaagcgatagccatgttccagaaattaggtgcaatgaatgtgaagtttgatattgtcacactcaataccatgattaatgcattgtacaaggttggaaaaaaagaagaagctaaggatttgtttgctgcaatatcagccagcgggttggtgcctaatgcttccacttacagcataatgataataaattatctgaaggaaggatcagtggaagatgctaacaatattttttcatcaatggagaagagtggcatagctcccagttctcgtcttataaattatatcatcagaatatatttggaaaaaggtgagatcgccaaggctggagattatttgtccaaggttgatgggaagaacatcttacttgaagcttcaactacgtcgctgatgttgtctctcttttcaagaaacgggaaatatcaggagaatatcaaattgcttcctgcaaagtatcagtttttttatggatttggt

SEQ ID NO: 2695 - DNA, 975 bp, Triticum aestivum; identical to SEQ ID NO: 2694
  source 1..975: mol_type = genomic DNA

SEQ ID NO: 2696 - DNA, 975 bp, Triticum aestivum
  source 1..975: mol_type = genomic DNA
atgatgaacaaaggtattcctcgtcctgacattgcgttcttcacttcaataataaatagtctatgcaaagaaggaagggttatggatgcacaaaatatctttgacttgcttgttgccatagatgagaggcctaatgtcattacatttaattcactaattgacggatattgcttagtcggcgagatggataaagtattcagagtacttgatgccatgaaatcagttggtgctgagcctgatattgttacatacaatacacttgttaatggctattgtagaaatggaaggattgacgatgacttggctttgttcagggaaatgccatgtaagggaataaaacctgacactgttgcatattgcatcatactagatgggttgtttcatgccgggagaattgtcgttgcaaggaaaatgttccatgagatgatcgaaagtggaacaacagtgggcattcccatatacaatataacacttaaaggcctttctagaaataactgtgcacatgaagcgatagccatgttccagaaattaggtgcaatgaatgtgaagtttgatattgtcacactcaataccatgattaatgcattgtacaaggttggaagaaaagaagaagctaaggatttgtttgctgcaatatcagccagcgggttggtgcctaatgcttccacttacagcataatgataataaattatctgaaggaaggatcagtggaagatgctaacaatattttttcatcaatggagaagagtggcatagctcccagttctcgtcttataaattatatcatcagaatatatttggaaaaaggtgagatcgccaaggctggagattatttgtccaaggttgatgggaagaacatcttacttgaagcttcaactacgtcgctgatgttgtctctcttttcaagaaacgggaaatatcaggagaatatcaaattgcttcctgcaaagtatcagtttttttatggatttggt

SEQ ID NO: 2697 - DNA, 975 bp, Triticum aestivum
  source 1..975: mol_type = genomic DNA
atgatgaacaaaggtattcctcgtcctgacattgcgttcttcacttcaataataaatagtctatgcaaagaaggaagggttatggatgcacaaaatatctttgacttgcttgttgccatagatgagaggcctaatgtcattacatttaattcactaattgacggatattgcttagttggcgagatggataaagtattcagagtacttgatgccatgaaatcagttggtgctgagcctgatattgttacatacaatacacttgttaatggctattgtagaaatggaaggattgacgatgacttggctttgttcagggaaatgccatgtaagggaataaaacctgacactgttgcatattgcatcatactagatgggttgtttcatgccgggagaattgtcgttgcaaggaaaatgttccatgagatgatcgaaagtggaacaacagtgggcattcccatatacaatataacacttaaaggcctttctagaaataactgtgcacacgaagcgatagccatgttccagaaattaggtgcaatgaatgtgaaatttgatattgtcacactcaataccatgattaatgcattgtacaaggttggaaaaaaagaagaagctaaggatttgtttgctgcaatatcagccagcgggttggtgcctaatgcttccacttacagcataatgataataaattatctgaaggaaggatcagtggaagatgctaacaatattttttcatcaatggagaagagtggcatagctcccagttctcgtcttataaattatatcatcagaatatatttggaaagaggtgagatcgccaaggctggagattatttgtccaaggttgatgggaagaacatcttacttgaagcttcaactacgtcgctgatgttgtctctcttttcaagaaacgggaaatatcaggagaatatcaaattgcttcctgcaaagtatcagtttttttatggatttggt

SEQ ID NO: 2698 - DNA, 975 bp, Triticum aestivum; identical to SEQ ID NO: 2694
  source 1..975: mol_type = genomic DNA

SEQ ID NO: 2699 - DNA, 975 bp, Triticum aestivum; identical to SEQ ID NO: 2694
  source 1..975: mol_type = genomic DNA

SEQ ID NO: 2700 - DNA, 975 bp, Triticum aestivum; identical to SEQ ID NO: 2694
  source 1..975: mol_type = genomic DNA

SEQ ID NO: 2701 - DNA, 852 bp, Triticum aestivum
  source 1..852: mol_type = genomic DNA
atgcactcaaatgaggcattggatctgctgctccaccggatgcccgaactggactgtgcgcctgatgtcttctcgttcaacatagtaatcaacggctgctttagagaaggtgaagtagacaaagcatgcaatctcttccatgagatgccccaactgggagttcaacctgatgtggtgacctacaactcaattatcatcgcactaagcagggccggrgcaatgggtaaggcagaagtggtccttcggcaaatggttgataaaggcattggacccgatgtcatgacatataacagtctgatccatggatattctactttgggtcagtggaaggcagcagttagggtattcaaagagatggtaagtgttggtgttctaccaaatgctgtcacgttgaactcatttatggattcactttgcaagcatagaaggacaaaggaagctagagatatttttgactccatggctgcaaagggccacaaacctaatattgcctcctactctactatgcttaatgggtatgcgaaacaaggatgcttcgatgatatgactggtctcttcaattcgatgctacagaatggtgttgtaccaaaccaccatattttcaacatactgatcaatgcatatgctaaacgtggactgatggatgaggctatgcacatgttcgaagtaatgaggcaacaaggagtaaacccagatgtatttagctatcaaattgtaatggattcactttgtaaatgggtaggatggatgctgctctggacaaatttaatcagatggtcaatcaaggagtttcacctaacaaagctgtttaccaatgcctggttctgggttcttgttctcatggtcattttg

SEQ ID NO: 2702 - DNA, 984 bp, Triticum aestivum
  source 1..984: mol_type = genomic DNA
atgatgaacaaaggtatacctcgtcctgatattatgttcttccattcaatcatgcagaacctatgcacagaaggaagggtagtagaagcacgggatatccttggcttgatagcacacataggtatgaggcctaatgtttgcacatttaatatactgattggtggatactgcctagtccgcaagatggaggatgcctcaaaaatatttcatgatatgatgccatatggtttagaaccttctaatattacgtatggtatacttattaatggctattgcaaaaacttaaggattgacgatgggctgattctgttcaaagaaatgttgcgcaagggacttaaacctacaactttaaattataacattatactggatggcttatttctggctggacgaactgctgctgcaaaagagaagtttgatgagatggttgaatctggagcagatgtgtgcattgatacatactgtatagttcttggtggactttgtagaaataattgctacagcgaagcaatcatgctgttccagaaattaagcgcaatgaatgtgaaatttgatattacagttgtcaatatcattattggtgcattctacagggtccagagaaaccaagaggctaaggatttgtttgttgctataccagccaatggcttggttcctaattctgttacctacaccataatgatgagaaatcttataaaagaaggttcagtagaagaagctgacaatctttttttatcgatggagaatagcggctgtactgccaactctaatatgttaaatcttatcgtcagaatgttactggaaaaaggagagatagtcaaggctgggaattatatgtctaaagttgatgcaaagagctactcacttgaagctaaaactgtttcgctgctgatctctctcttttcagggaaagggaaatatagagaacacataggattgctccctacaaagtatcagtttcgtgaagaagcagccacggttgtg

SEQ ID NO: 2703 - DNA, 840 bp, Triticum aestivum
  source 1..840: mol_type = genomic DNA
atgccagccgcccgcctgtcctccttcaaggctccttcacgagagcgccgacctcccctcgccgccttggctgccgccacggagcgcgtccgcgccggaacgctaagtcggcaggacgcgcaccacctgttcgacgaattgctgagccaagccgcgacagtcccagtacgcaagctgaacaactttcttgccgccctcgcccgtgcaccgccctcagctgcctgcagcgatggtccgggccttgccattgccctcttcaaccgcatgtcccgaggcgctggtgcacgggtggtgtcgcccacgctctgtacctattccatcctcatggactgctgctgccgtgcacgccgcccggacttggtggtggccttcttcggccgcctcctcaggttggggctgcgcttggaggtcatctccttcagcaatctcctcaaggggctctgccaggccaagcgtacaaatgaggcggtggacttgctgctccaccggacacctgaactggactgtgtgcctgatgtcgtctcgtacaacatagtaatcaacggctgtttaaaagaaggtgaagtagacaaagcgtgcaatctcttccatgagatgccccaactgggagttcaacctgatgtggtgacctacaactcaattattgacgcactaagcaaatccagagcaatggacaaggcagaagtagtccttcggcaaatggttgatcaaggcattggacccgatgtcatgacatatactagtctgatccatggatattccacttcaggtcagtggaaggaggcagttaggttattcaagaaaatgacaagtcttggtgctctaccataccgtcatgtg

SEQ ID NO: 2704 - DNA, 990 bp, Triticum aestivum
  source 1..990: mol_type = genomic DNA
atgcccgacgacctgcctaatgccatctcctactcagtaattctcaagagtttctgcgacagtgggaggagccagcttgcgcttgacctgctccaaatgatggccaaaaaaggagctgaccactcccccgacgtggttgcatacaacatggtaatcgatggcttctttaaggagggcgaagtaagcaaagcatgcgatctgttccatgaaatgatacaacagggggttgtgcctactgtggtgacgtataactctgttatcgatgcgctatgcaaagcaagagcaatggacaaggcggaggtggttcttcgatcaatggttcataacggtgtacacccgaatactgtgacatataatagcttgatccaaggatattcaactttgggacagttgaaagaagtcgctaggttgttgaaagtgatgagaagccaaggtgttatgccaagcgttgttacctacaactcactcatggactacctttgcaagcatggaagaatcaaagaagctgaggaaatattttattccatggccgtgaatggccgaagaccagatatagtctcatactctattatgctccatgggtacgctatagaaggatcccttgttgaaatgattgatctctgtgagctgatggcaagagatggagttgtacccgacctccgttgtttcaacatactgattaatgcatatgctaagtatggtaggatggatgtggccatgcttttctttgaagacatgttgaagcagggtgtgaagcctaatgaattcacttatttaactgtgatatctgcattttgcaagatgggcaggatggatgatgcgatggaaaaattcagtgagatgattgatatcggagtaccacttgacacagaagtttacatgtgcatggttgagggttattttaatcatggtgattccatgaaagccgaggaatttattaccagaatgaagaacaaggatattaatcataagccgtgggaaggtaatcga

SEQ ID NO: 2705 - DNA, 990 bp, Triticum aestivum; identical to SEQ ID NO: 2704
  source 1..990: mol_type = genomic DNA

SEQ ID NO: 2706 - DNA, 990 bp, Triticum aestivum; identical to SEQ ID NO: 2704
  source 1..990: mol_type = genomic DNA

SEQ ID NO: 2707 - DNA, 990 bp, Triticum aestivum; identical to SEQ ID NO: 2704
  source 1..990: mol_type = genomic DNA

SEQ ID NO: 2708 - DNA, 750 bp, Triticum aestivum
  source 1..750: mol_type = genomic DNA
atgccagccgcccgcctgtcctccatctccacctcctccttcagggctccttcacgagcccccctcgccgccttggctgccgccacggagcgtgtccgcgcgggaacgctgagccaggatgacgcgcaccacctgttcgaccaattgcttggccaagccgccgccgtcccggaacgcgggctcaacaactttcttgccgcactcgcccgtgctccaccctcagctgcctgccgcgatggccccggccttgccatcgccctcttcaaccgcatgtcccgaggcgctggtgcacgggtggcgtcgcccacgctctgtacctattccatcctcatggactgctgctgccgcgcaggccgcccggacttggtgcttgccttcttcggccgcctcctcaggttggggctgcgcttggatatcatctcctccagcaatctcctcaaggggctctgccaggccaagcgttcaaatgaggctttggacatgctgctccaccggatgcccgaactggactgtgtgcctgatgtcttctcgtacagcatagtaatcaacggctgttttaaacaaggtgaagtagacaaagcgtgcaatctcttccatcagatgccccaactgggagttcaacctaatgtggtgatctacaactcagttatcgacgcactaagcaaatccggagcaatggacaaggcagaagtggtccttggcaaatggttgatcaaggaattgaacccaatatcaagacatataactgtc

SEQ ID NO: 2709 - DNA, 750 bp, Triticum aestivum; identical to SEQ ID NO: 2708
  source 1..750: mol_type = genomic DNA

SEQ ID NO: 2710 - DNA, 972 bp, Triticum aestivum
  source 1..972: mol_type = genomic DNA
atgctacagaggggaatttcgccgaatgttgtgacctgcaattcaatcatctctggcatgtgcaaagttcatgcgatggacaaggcagaggaggttcttcaacagatgactgatagaggtattctgcctgatgttgccacatataccagtctcatacatggatattattcattaggacagtgcaaagaggtggatcggattttcaaggagatgactagaaatggtgtccaaccaaatgttgtaacttatagtatacagatggattatctttgcaagagcggaagatgcgcggaagctaggaagatctttgattctatggtcagtttgggccaaaaaccgtctgttactacctacagtattctgcttcatggttatgttatggaaaaatcatttcatgatatgcattgtctccttgattttatggtagaaaatggtatctcaccagatcatcatgtctacaacatactcatatctgcatatgctaaagaggaaatggcaagtgaggtaatgcatatatttacaaaaatgcggcagcaaggattgaaccctagtgttgcggactatggagcggtaataaacttgctttccagtattggcagaatggatgatgctatgtcccaattcaatcaaatgatagccgaaggattagctcctgatatcatagttttcaacccccttattagtggtttttgtacttgtggcaaatgggagaaggttcatgaactattttctgaaatgttgaatcgcggcacctatcatgataccgtgttcttcaccacaattatggaccgcctttgcaaaaatggaagggttatggaatcccaagatatgtttgacctgatggtacacgtgggtgttaagcctaatgttcatacttatgccacattgatgcatgggtactttttcgttaggaagatggatgaagtgaggaagttagttggcaatatgctctcaattggctcgaaaccggat

SEQ ID NO: 2711 - DNA, 846 bp, Triticum aestivum
  source 1..846: mol_type = genomic DNA
atggccctgccctcgccacgcatggcccaagcaggtcgtcgccaggtgccagcaccctccatttacacctacaacatactaattgactgctgccaccgagcatgccggccggacctagggcctgccttcttcggtcgcctcctcaacacaggcatcacaatgagcgtcattacctacatcagcctattcaagtgcctctgtgacatgaagcgcacagaggaggctctgaacgtgctgctccatagaatgcccgacgacctgcctaatgtcatctcctactcagtgattctcaagagtttctgcgatagtgggaggagccagcttgcgcttgacctgctccaaatgatggccaaaaaaggtgctgaccactcccccgacgcgatgtcatacaacatcgtaatcgatggcttttttaaagagggtgaagtaagcaaagcatgcgatttgttccatgaaatgatgcagcagggggttgtgcccgatatggcaacgtacaactccgttatcgatgcgctatgcaaagcaagagcaatggacaaggcagaggtggttcttcgatcaatggttcataatggtgtccaaccagatgttgtgacatataatagcttgatccaaggatattcaactttgggacagttgaaagaagtcgctaggttgttgaaagtgatgagaagccaaggtgttatgccaagtgttgttacctacaactcactcatggactacctttgcaagcatggaagaatcaaagaagctgaggaaatacttgattccatggccgtgaatggccgaaaaccagatctcatactctattatgctccatgggtacgctatagaaggatcccttgt

SEQ ID NO: 2712 - DNA, 846 bp, Triticum aestivum; identical to SEQ ID NO: 2711
  source 1..846: mol_type = genomic DNA

SEQ ID NO: 2713 - DNA, 846 bp, Triticum aestivum; identical to SEQ ID NO: 2711
  source 1..846: mol_type = genomic DNA

SEQ ID NO: 2714 - DNA, 846 bp, Triticum aestivum; identical to SEQ ID NO: 2711
  source 1..846: mol_type = genomic DNA

SEQ ID NO: 2715 - DNA, 846 bp, Triticum aestivum; identical to SEQ ID NO: 2711
  source 1..846: mol_type = genomic DNA

SEQ ID NO: 2716 - DNA, 846 bp, Triticum aestivum; identical to SEQ ID NO: 2711
  source 1..846: mol_type = genomic DNA

SEQ ID NO: 2717 - DNA, 762 bp, Triticum aestivum
  source 1..762: mol_type = genomic DNA
atgccccgtctccgcctccgtcgcttctccaccgcgccgatgttccacctcctccgccgcagctcctcctccaccaccacctcgccgccctcgcgttcctggtctccccacgccgcctttgccgccgccacggagcgcatcagcgccgggacgctcagccgggaagacgcgcaccgcctgttcgacgaattgctacggcaggccaccccggtccccagccgctccctaaacggcttcctcgccgccctcgcgcgtgctacgtcctctgccgcctgcatcagagatggtcgcgccctcgccatcgccctcttcaaccgcgtgtgtcgagagcaatccggcccgcgggtggtgcctctcacagtccacacgtacaacatcctcatggactgctgctgccgcgcgtctcgcccggacctaggtcttgccttcttcgctcgcctcctcaggacaggcctgaagacaaacgagatcaccgccaacaccttcctcaagtgcctctgctacgcaaaacggacggatgaggctctgaacgtgctgcttcataggatgtccgagctcggctgtgtgcctgatgccatctcatacaacattgttctgaagagcttatgtgaagatagcatgagtcagcgggcgctcgacctcctccagatgatggcgaaagaaggaggtggctgctcccccaacgtggtggcgtataacacggtcatccatggcttttttaaggaaggtgaaacaggcaaggatgcaatctgttccatgaaa

SEQ ID NO: 2718 - DNA, 762 bp, Triticum aestivum; identical to SEQ ID NO: 2717
  source 1..762: mol_type = genomic DNA

SEQ ID NO: 2719 - DNA, 762 bp, Triticum aestivum; identical to SEQ ID NO: 2717
  source 1..762: mol_type = genomic DNA

SEQ ID NO: 2720 - DNA, 975 bp, Triticum aestivum
  source 1..975: mol_type = genomic DNA
atgcggcagcaaggattgaaccctaatgttgtgaactatggagcggtaataaacttgctttctagtattggccgaatggatgatgctatgtcccaattcaatcaaatgataactgaagggttagctcctgatatcatagttttcaactcccttattagtggtttctgttcttgtggcaaatgggagaaggttcatgaactattttctgagatgttggatcgtggcatctgtcccgacagagtgttcttcaacactgttatggatcacctttgcaaaaatggaagggttatggaagcccaagatgtgttcgacctgatggtacacatgggtgtgaagccttttgtccgtgattacaacacactgattcatggatactgtttagttggtaagatggatgaagggaggaagttacttgataatatgttctcaattggcttgaaaccgggtgatttcacctatagcatactgattgatggttactctaagaagggaaggatagatgatgcattgattattgtcagggtaatgttggacgggaaggttaagccttctattatcacttttaatattatgattggtgcgttgcttaaaggtggcagaaaggaagaagccaaagatttgtttaatggtatctgggccaaaggattagtgcccgatgttgttacatatagcttaatgatacaaaaacttatagaagaaggttctctacaagagtctgatgatctattcctttctatggagaagaatggatgtgctgccgactcccgcatgctaaatgctatagttagaagcttacttcagaaaggggacgtgcccagggctgggacttatctgtctaaaattgatgagaggagcttcacccttgaaggttccacagctagcttgttgactgcacttgcttcagggaggaaaggccaggaatataaggggttactccccgaaaaataccactattttctggaacagggcactgat

SEQ ID NO: 2721 - DNA, 957 bp, Triticum aestivum
  source 1..957: mol_type = genomic DNA
atgcctcgcttctcctccaccacgtcaatgtcgccactgcgcctccgcctccgcctccacgcccgccactcctccgcctctcaaccctcacgcagccagggctgggatccccacgccgccttcgccgccgcgacgcagcgtgcgcgctctggcagcctcacaccggcggacgcacaccacctgttcgacgaattgctgcggcaggccaatcctgtccaggagcgccccctcaacaaccttctcgccgccatcgtccgcgctccggcgtccaacgcctgcagaaacggccctgcactcgcggtcgccctcttcagtcgcatatcccaaggcgcccgccgacgggtggcgcagccaaatgtcttcacctatggcgtcctcatggactgttgctgtcgtgcgcgccgcctggatctagcaatcgccttcttcggccgtctcctcaagacgggcctggaggcagacctagtctttttcagcaccctcctcaagggactctgccacgcaaagcgctcagatgaagctctggacgtgctgctgcacaggatgcctgagctgggctgcacccccgacgtggtggtgtataacaccgtcatccatggattctttagggaaggccaagtaggcaaggcgtgcgatatgttccatggaatggcgcagcagggcgttgcgcctaatgtggtgacatataactcggttattgatgcgctgtgcaaggccagagcaatggacaaggccgagtatttccttcgtcaaatggttgataatggtgtcgtacctgataatgtgacttataatagcctcatccatggatactcctcttcaggccatcaaaaggagacgcttagggtgctgaaagaaatgacaagtcagggtattataccagatgttgttacttgcaactcgctcatggcctacctttgcaagaacggaagaagcaaagaagctgcagaatttttt

SEQ ID NO: 2722 - DNA, 963 bp, Triticum aestivum
  source 1..963: mol_type = genomic DNA
atgccccgtcgtctcccactcgccttgctcccacttcacaccaaggccatgcctcgcctctcctccaccacgcccatgtcgccactccgcctccgcctccgcgcccgccactcctcctccacctcccattcctcacgcagctgggagccccacaccgccttcgccgccgccacggagcgtgcgcgctctggcaacctcaccccggaggacgcacaccacctgttcgatgaattgctgcggcaggccaatcctgtccaggagcgcccgctcaacaaccttcttgccgccctcgcccgcgctccggcgtccgcggcgtgcagtgatggccttgcactcgcagtcaacctcttcagccgcatatcccaaggcgcccgctgtgtggcgcacccaacggcctgcacctacggcatcctcatggactgttgctgccgcgcacaccgcctcgatctggcgtttgctttcttcggccgtctcctcaggacgggacttaaggcaggcgtcattcaagtttgcactcttctcaagggcctctgccacgcaaagcgcacagatgaggctctcaacgtgctgcttcacaggatgactgagctgggctgcacccctgacgtggtggcgtataacacggtcatccatggcttcttcaaggaaggccaagtaggcaaggcgtgcagcctgttccatgaaatggcgcagcagggcgttgcgcctaatttgatgacatatacctcggttattgatgcgctgtgcaaggccaaagcaatggacaaggcagagtatttccttcgtcagatggttgataatggtgtcgtacctgataatgtcacatataatagcctcatccatggatattcctcttcaggccattggaaggaggcagttagggtatccaaagagatgacaagtcggagggttacagcagatgtgcatacttacaacatgtttatgacctttctttgcaaacat

SEQ ID NO: 2723 - DNA, 963 bp, Triticum aestivum; identical to SEQ ID NO: 2722
  source 1..963: mol_type = genomic DNA

SEQ ID NO: 2724 - DNA, 963 bp, Triticum aestivum; identical to SEQ ID NO: 2722
  source 1..963: mol_type = genomic DNA

SEQ ID NO: 2725 - DNA, 963 bp, Triticum aestivum; identical to SEQ ID NO: 2722
  source 1..963: mol_type = genomic DNA

SEQ ID NO: 2726 - DNA, 963 bp, Triticum aestivum; identical to SEQ ID NO: 2722
  source 1..963: mol_type = genomic DNA

SEQ ID NO: 2727 - DNA, 963 bp, Triticum aestivum; identical to SEQ ID NO: 2722
  source 1..963: mol_type = genomic DNA

SEQ ID NO: 2728 - DNA, 636 bp, Triticum aestivum
  source 1..636: mol_type = genomic DNA
atggacagctgctgccgtgcacgtcgcccggacctaggccttgccttcttcggccgcttcctcaggacgggcctcaaggcagacctgatcgtcgccagcaccctcctcaagtgcctctgccatgtaagacggacaaatgaggctgtcaacatgctgcttcataggatgtccgagttcggttgtgtgcctgatgccatctcatactccatagtacttaagagcttatgtgacaatagcaggagccagcaagcgctcgacctgctccagatggtgaggaaagaacgaggtgccagctccctcaatgtggtggcatatagcataatcatacacggcttctttaaggaaggggaagtaagcaaggcatgcgatctgttccatgagatgatgcagcaagggattgtgcctgatgtggtgaaatataggtcggttattgatgccttgtgcaaggtcagggcaatggacaaggcaaagctggtccttcagcagatggttaataatggcgttcgaccaaatatgtatacttggaactcatttatgtactccctatgcaagcatggaagaagcaaagaagctgcagaattttttgactccatggtagaaacagctagggttctaccaggcctagggcgtagttta

SEQ ID NO: 2729 - DNA, 933 bp, Triticum aestivum
  source 1..933: mol_type = genomic DNA
atgaagttcagtgcagttccaagtttggttgagtgtctgacctccgccggtcatccagtctccagtggtttgtcgtcgccgacacgctcccacattcgccactgcaggaaggagcaagacctcccacgtctgacccggtcgtcctccagctccggctcctcacgggtcaaccagctgctaaacaaactcaaggattatcttggctctgggacgctcaggccggagctcgcgcaccaactgttcgtcgaattgtttcgtcaaaccgttccggtatcagcagacgcactcaatgtcttattttctgccctcgcgtgtgggctgccctctgccgcctgcaatgatggtcctgccctcgcaatcgccctcttcaaacacatggcacgagcaagatgccgccaggtgatggcacccaccaatcacacttacaacacactaattgagtgctgccacatggcacgccgccctgacatagggctcgtcttctttggcctcctcctcaagataggcatcacggcagatgtcttcaccttcaacagcttattgaagtgcctctgtgacatgaagcaaacagatgaggctctaggcgtgctgctccacaggatgcccggcgacatgcctgatgtcatctcctactcagtaattatcaagagcttctgtgacaacgggaggagccaccgtgcacttgacctgctccggatgatgaccaaaaagggatatgaccactcccccaatgtggtttcatacacaataatcattgatggattaattaaggagggtgaactaagcaaagcatgtgctctattccatgaaatgatgcagcagggggttgtgcctgatgtggtgacgtatagctccattatcgatgggttgtgcaaagcaagagcattggacgaggcagaggtggtccttcgacaaatgattgatagcggtgtt

SEQ ID NO: 2730 - DNA, 933 bp, Triticum aestivum; identical to SEQ ID NO: 2729
  source 1..933: mol_type = genomic DNA

SEQ ID NO: 2731 - DNA, 933 bp, Triticum aestivum; identical to SEQ ID NO: 2729
  source 1..933: mol_type = genomic DNA

SEQ ID NO: 2732 - DNA, 933 bp, Triticum aestivum; identical to SEQ ID NO: 2729
  source 1..933: mol_type = genomic DNA

SEQ ID NO: 2733 - DNA, 933 bp, Triticum aestivum; identical to SEQ ID NO: 2729
  source 1..933: mol_type = genomic DNA

SEQ ID NO: 2734 - DNA, 933 bp, Triticum aestivum; identical to SEQ ID NO: 2729
  source 1..933: mol_type = genomic DNA

SEQ ID NO: 2735 - DNA, 804 bp, Triticum aestivum
  source 1..804: mol_type = genomic DNA
atgcgcccatgccggacgcctctcctcgactccacctcgccgctgtccgtgctcctactcgaccacctccaccgcaatcgcccctcccctcccccctcagcctcgccgccgtcagccatctggtctcccatcgccgcattcgccgctgccacgaagcgcgcccgagccgggacgctcagccctgaggacgcacaccacctgttcgacgaattgctacgccagtccatcccggtccccaaccgcttcctgaacggcttccttgccgccctcgcccgtgccccagtctccgaagcctgcggagatggccccgccctcaccgtcgccctcttcaaccgcctctgccgagaagaagccggcccttgtgtagagccgcccacttactatacctacagcattctaatggacagctgctgccgcgtgggtcgccccgaccttgggcttgctttcttcggccgcctactcaagtcaggcctcaaggcagaccagatcaccgccagcagcctcctcatgtgcctctgcgatgcaggacggacaaacgaggctgtggacgtgctgcttcataggatctccgagctcggctgtgagcctaatgtcatcccatacaacatagttcttaagagcttatgtgacagtagcaggagccagcgagctcttgacctgctccagatgatggcacaaagagcttgctgctcccctaatgtggtgtcatataacaccgtcattcagggcttatttaaggaaggccaagtaagcatggcgcgcacattcttcttctatgaaatgatggggttatgcctaatgtgg

SEQ ID NO: 2736 - DNA, 804 bp, Triticum aestivum; identical to SEQ ID NO: 2735
  source 1..804: mol_type = genomic DNA

SEQ ID NO: 2737 - DNA, 804 bp, Triticum aestivum; identical to SEQ ID NO: 2735
  source 1..804: mol_type = genomic DNA

SEQ ID NO: 2738 - DNA, 804 bp, Triticum aestivum; identical to SEQ ID NO: 2735
  source 1..804: mol_type = genomic DNA

SEQ ID NO: 2739 - DNA, 804 bp, Triticum aestivum; identical to SEQ ID NO: 2735
  source 1..804: mol_type = genomic DNA

SEQ ID NO: 2740 - DNA, 804 bp, Triticum aestivum; identical to SEQ ID NO: 2735
  source 1..804: mol_type = genomic DNA

SEQ ID NO: 2741 - DNA, 963 bp, Triticum aestivum
  source 1..963: mol_type = genomic DNA
atggattatctttgcaagagtagaagatgtgcggaagctaggacgatttttgattctatggccggaaaggaccaaaaaccgaacgttactagctacagtattctgcttcatgcgtatgctatggaacagtcatttcatgatatgcattgtctcattgaattgatggtagaaaatggtgttgcaccaaatcattctgtgtacaacatactgatagacgcatatgctaaggggaaaatggttgatgatgtaatgcacatatttacaaaaatgcggcagcaaggattgaacccaaatgctgtgaactatggaacagtaataaacttactctgcagtattggccgaatggatgatgctatgttgcaattcaatcaaatgataactgaagaattagttcctgatatcatagttttcaacactcttataagtggttttttttcttgtggaaaatgggagaaggttcatgaactacttgctgaaatgttgaatcgtggcatctatcccgacaacgtgttcttcaacacaattatggatcacctttgcaaaaatggaagggttatggaatcccaagatctcgctgacctgatgatacacatgggtttgaagcctgacgtgcatacttataacacactgatgggtggatactttttcattggtaagatggatgaagtgaggaagttacttgaccatatggtctcaattggcatggaaccggatgttgtcacctataacacactgattgatggttactttaagaatggaatgatagatgatgcgttagctgttttcagtgaaatgttggacaagaaagttaagccttgcgttatcacttataacacagtgctgcatgggttatttcatactggaaggactgttgctgcaaatgaactctatctcaggatgattgacagcggaatatgtgtggacattgtgacctacaacaactccgcctatgttgtctcaaca

SEQ ID NO: 2742 - DNA, 963 bp, Triticum aestivum; identical to SEQ ID NO: 2741
  source 1..963: mol_type = genomic DNA

SEQ ID NO: 2743 - DNA, 963 bp, Triticum aestivum; identical to SEQ ID NO: 2741
  source 1..963: mol_type = genomic DNA

SEQ ID NO: 2744 - DNA, 963 bp, Triticum aestivum; identical to SEQ ID NO: 2741
  source 1..963: mol_type = genomic DNA

SEQ ID NO: 2745 - DNA, 963 bp, Triticum aestivum; identical to SEQ ID NO: 2741
  source 1..963: mol_type = genomic DNA

SEQ ID NO: 2746 - DNA, 963 bp, Triticum aestivum; identical to SEQ ID NO: 2741
  source 1..963: mol_type = genomic DNA

SEQ ID NO: 2747 - DNA, 909 bp, Triticum aestivum
  source 1..909: mol_type = genomic DNA
atgctccgccgcatccgcatccgcatccgcctccgtcgccgcccctacccctcctgcacctacccggagcccgtcctctgccactcctccagctttatctctgcggctcccctcctccgcctccaccagtaccgcaccaccaccacgccgatgtcccgcatccacctccgccgtcgcctcttctcctccaccacgcggccctcgcactcctggtctccacatgccgcctttgccgcagcaacaaagcgcgtacgcaccggggcgctcagccaagacgatgcacaccacctgttcgacgaattgctgcggcaggccaccccggtccccgggcgctccctcaacggcttccttgccgccctcgcccgtgcgcccgcctccggagcctgcagagatgggcccgccctcgccctcgctctcttcaaccgcgtctgccgggatgaatccggcgcgcgggtggcaccgcccacaatcttcacctacggcatcctcatgaactgctgctgccgcgcgcatcgcccggacctagggctcgccttcttggctcgcctcctcaggacgggcctgaaggctgaccagatcaccgccaccaccttcctcaagtgcctctgctacgcaaaacggacggatgaggctgtgaacgtgctgcttcataggatgcccgagctcggctgtgtgcctgacgccttcgcatactccactgttctgaagagcttatgcgacaatagcatgagtcagcgggggctcgacctgctccatatgatggcgaaagaaggaggtggctgctcccccaacgtggtggcgtgtagcaccgtcatccatggcttctttaaggaaggtgaaacaggcaaggcatgcaatctgttccatgaaatgatgcagcaaggtgttgagcccaatgtgtggacatac

SEQ ID NO: 2748 - DNA, 909 bp, Triticum aestivum; identical to SEQ ID NO: 2747
  source 1..909: mol_type = genomic DNA

SEQ ID NO: 2749 - DNA, 909 bp, Triticum aestivum; identical to SEQ ID NO: 2747
  source 1..909: mol_type = genomic DNA

SEQ ID NO: 2750 - DNA, 861 bp, Triticum aestivum
  source 1..861: mol_type = genomic DNA
atgttggatcgcggcatctgtccagacacagtgttcttcaacactgttatggatcacctttgcaaaaatggaagggttatggaagcccaagatgtgttcgacctgatggtacacatgggtgtgaagccttttgtctatgattacaacacactgatacatggatactgtttagtttgtaagatggatgaagagaggaagttacttgacaatatgttctcaattggcttgaaacctgatgatttcacctatagcatactgattgatgattactctaagaagggaaggatagatgacgcattgattattgtcagggaaatgttggacgggaaggttaagccttctattatcacttttaatattatgattggtgtgttgcttaaaggtggcataaaggaagaagccaaagatttgtttgatggtgtctgggccaaaggattagtgcctgacgttgttacatatagattaatgatacaaaagcttatagaagaaggttctctacaagagtctgatgatctattcctttctatggagaagaatggatgtgttgccgactcccatatgctaaatgctacagttagaagcttacttcagaaaggggaggtgcccatggctgggacttatctgtctaaaattgatgagaggaggttcacctttgaagctcccactgctagcttattgactgcacttgcgtcagggggaaaggccaggaatataaggagttactccctgaaaaataccactcttttctggaacagggcactggttgaaaccatttctagagattttgcctacatattctggactgctattcgaggcctgaacttttctttgtgggttacatctcccaaccttttattttcg

SEQ ID NO: 2751 - DNA, 861 bp, Triticum aestivum; identical to SEQ ID NO: 2750
  source 1..861: mol_type = genomic DNA

SEQ ID NO: 2752 - DNA, 861 bp, Triticum aestivum; identical to SEQ ID NO: 2750
  source 1..861: mol_type = genomic DNA

SEQ ID NO: 2753 - DNA, 879 bp, Triticum aestivum
  source 1..879: mol_type = genomic DNA
atgtttgacttcattgtaggtattggtcagcggcctgatgtgattatgtacaattcactgatggatggatattgccttgttggcaaagtggaggaagcactgagagtacttgatgctatgaagtctgctggcctccaacctgatgcttttacatacggtatacttcttaatggctactgtaaaattggaaggatcgccgctggattgagtcttttcatggaaatgtcactcagcagggttaagcccacgactattatgtacaacattatacttgatgggctgtttcgctccgggagaacagtttctgcaaaggaaaaattccgtacgatgagcgaaagtggcataccagtgggcattgacacatacaacatagttcttaatggactttgcaaaaacaattgcactgatgaagcaatagagctgttcaagaaattacgtgcaacgaacgtgaagattgatgtcataacattcagtaccatgatttctgcaatgtttaaaactaggagaattgaagaggccaaggatttgtttgctactatatcagccattgggttggtgccttctgttgtgacttacagtttaatgatgacgaatttcataaaagaagggttgctggcagatgctgatgatatgtttttagcaatggagaaggctggctgtgctcctgactccaggctgctaaatcaagtggtcagggtatttctgaagaatggtgaagttgtaaaggctgtgacttatctcgctaaacttgatgctaaacagctgtcagttgaagcttcaacgatttcgttaatagtatctctcttctcaaggaaagggaaattaagggagcacgtaaaattgcttccggtaaagtaccagcctcctgagatgttgggc

SEQ ID NO: 2754 - DNA, 879 bp, Triticum aestivum; identical to SEQ ID NO: 2753
  source 1..879: mol_type = genomic DNA

SEQ ID NO: 2755 - DNA, 879 bp, Triticum aestivum; identical to SEQ ID NO: 2753
  source 1..879: mol_type = genomic DNA

SEQ ID NO: 2756 - DNA, 879 bp, Triticum aestivum; identical to SEQ ID NO: 2753
  source 1..879: mol_type = genomic DNA

SEQ ID NO: 2757 - DNA, 879 bp, Triticum aestivum; identical to SEQ ID NO: 2753
  source 1..879: mol_type = genomic DNA

SEQ ID NO: 2758 - DNA, 879 bp, Triticum aestivum; identical to SEQ ID NO: 2753
  source 1..879: mol_type = genomic DNA

SEQ ID NO: 2759 - DNA, 852 bp, Triticum aestivum
  source 1..852: mol_type = genomic DNA
atgcatggtgatctggtgaaagtgaaggagttgatttttgaaatgacggacaaaggtattcctcaccctaacattgtcttcttcagttcaataatgcatagtctgtgcaacgaaggaagggttatggatgcacaccatatctttgacttggttatagacattggtgagagacctgatctcattacatttaatacgctaattgacagatattgcttagtcagcaagatggaggaagcactccgactacttgattccatggtatcagctggcattaagccaaatgtgattacatataatacacttattaatggctataggagtggaaggctcgatgatggcgttattctatttagagaaatgttgcataccagagttaaacctaacactgttacatataacatcatactggatgggttatttcgtgctggaagaactgtttctgcgaagaagatgttccatgagatgatcgaaactggaacagcagtgagcatttccacatacagcatagttcttggaggactttgtaggaataactgcaccgatgaagcaatcgcttttttccaaaaattagttgcaatgaatgtgatgttcaatattgcgatactcaataccataattaaggcaatgtacacggttcagagaagagaagaagctaacgatttgtttgcttcattaccagcctatggactagtgcctaatgctgctacttacggagtaatgataagcaatcttctgaaagaaggatcgttggaagaagctgacaatatgttttcatcaatggagaagcgtggttgtgctccaagctctcgtcttgtaatgatatcatcagaaaattattggaaaagggggaga

SEQ ID NO: 2760 - DNA, 867 bp, Triticum aestivum
  source 1..867: mol_type = genomic DNA
atgcctcgcctctcctccaccacgaccacgcccatgtcgcctctccgcctccgcctccgcctccgcgcccgccactccgcctcaacctcccattcctcacgcagctgggagccccacgccgccttcgccgccgccgcggagcgtgcgcgctctggcaacctcaccccggaggacgcacacgacctgttcgacgaattgctcaggcagggcaatcctgtccaggagcgccccttgaacaaactcctctccgccctcgcccgtgctccggcgtccgcggcctgcagaaacggccctgcactcgcggtcaacctcttcagccgcatatcccaaggcgcccgcctacgggtggcgcagcctacagcctgcacctacggcgtcctcatggactgctgctgccgcgcacaccgcctggatctgacgctggccttcttcggcggtctccttaggacgggcctggaggcagaccaagtcatcttctgcaccctcctcaagggactctgccacgcaaagtgcacagatgaggctctcaacgtgctgcttcacaggatgcctgagctgggctgcacccccaatgtggtggcgtataacaccgtcatccatggcttctttagggaaggccaagtaggcaaggcgtgcaatctattccatgaaatgaggcagcagggcgttacacctgatgttgtgacatataactcggttattgatgtgttgtgcatgttggttgatctcggctctgaccgggtaaaaagtaacgttaaggggatgagccaggaaccaacgttcgtggcttttgaccccaacagaattgccctgatcgggggcacctctaaccgacagatggttttggtcccctattgccagcgcata

SEQ ID NO: 2761 - DNA, 867 bp, Triticum aestivum; identical to SEQ ID NO: 2760
  source 1..867: mol_type = genomic DNA

SEQ ID NO: 2762 - DNA, 900 bp, Triticum aestivum
  source 1..900: mol_type = genomic DNA
atgcctaatgtggtgacatatagcttgatggttggtgggttgtgcaaggtcggggcaagggacaaggcaaagctggtccttcggcatatggttggtaatagtgttcgaccagatatgtatacttggaactcattcatgggatctcttcgcaagcagggaagaagcaaggaagctacacaactttttgattacatggccgccaagggccacaaacctgatgttgtcatgtactctactctgcttcatgggtatgctactgaaggatgcttcactgatatgattaatcgctttaattcaatggaaggcaacggtattgtagctaacagccgtgtttttaacatactaatcgacgcatatgctaaacgtggaatgatgcatgaagctatgctcatatttactgaaatgcgggaacaaagagtgagtcctgatacattcacctatggaattataatagctgcactttgcagaatgggtaggctatctgatgctatggagaaattaaatgaaatggttgctacaggattacagccggacgaggctgtttactattccctaattcagggtttttgtacacatgatgatttggtcaaagctaaggagttggtttctgagatgatgaccaaaggtattcctcgtcctaacattgtgttcttcaactcggtaatagccaggctgtgcaaagaaggaagggttaaggatgcacacggtatctttgacttggctatgaacattggtgagaggcccaacgttattacatttaattcactgattcacggctatagcttggttggcaagatggcgaaagctttcggggtacttgatgacatggaatcagttggcattgagcccgatgttgttacttatactacacttcgtcatggctattctagaaatagaagg

SEQ ID NO: 2763 - DNA, 900 bp, Triticum aestivum; identical to SEQ ID NO: 2762
  source 1..900: mol_type = genomic DNA

SEQ ID NO: 2764 - DNA, 900 bp, Triticum aestivum; identical to SEQ ID NO: 2762
  source 1..900: mol_type = genomic DNA

SEQ ID NO: 2765 - DNA, 900 bp, Triticum aestivum; identical to SEQ ID NO: 2762
  source 1..900: mol_type = genomic DNA

SEQ ID NO: 2766 - DNA, 900 bp, Triticum aestivum; identical to SEQ ID NO: 2762
  source 1..900: mol_type = genomic DNA

SEQ ID NO: 2767 - DNA, 900 bp, Triticum aestivum; identical to SEQ ID NO: 2762
  source 1..900: mol_type = genomic DNA

SEQ ID NO: 2768 - DNA, 891 bp, Triticum aestivum
  source 1..891: mol_type = genomic DNA
atgatggttgaggatggaggtagctgccaacctagtgtggtgttctataacatcatagtttatgtcctgttgaaagagggtgcgatgggcaaggcttacaacctattttgtgaaatgctacagacggggatttcgccggatgttgtgacctataactcaatcatctatggcatgtgcaaggttcatgcgatggacatggctgaggaggttcttcaacagatgtttgatagaggtattcttccaaattatagaacatataatagtctaatacatggatattattctttaggacagtgcggagaggtggatcaggttttgagggaaatgtttggaaatggtgttcaaccaaatgtcgtaacttacagtgtacaaacggattatctttgcaagagtggaagatgcacagaagctaggaagatttttgattctatgaccggtttgggccaaaaaccaactgttactaactacaacattttgcttcatgggtatgctatggaacgatcatttcatgatatgcattgtctcattgatttgatggtagaaaatggtattgtaccacatcaccatatctaccacatactgatatttgcatgttctaaagaaaaaatggttgatgaagcaatgcatatatttaaaaaaatgcggcagcaaggattgaaccctaatgcagcgagctatggaacggtaataaacttgctttgcaacattggccgaatggatgatatgatgttacaattcaatcaaatgataacggaaggattagctcctgatatcatagttttcaacacccttttgattggtttttgttcttgtggcaaatgggagaaggtttatgaactattttctgaaatgttgaatcgtggcatctatccagtaatgtgttcttcaaga

SEQ ID NO: 2769 - DNA, 864 bp, Triticum aestivum
  source 1..864: mol_type = genomic DNA
atgatggatgaagctatgctcatattttctggaatgtgcggacaaggagtgactccagagtctagaatggctaggctggctgatgctttgaataagttcagtcagatgatttcaactgatatacaaccgaacacagttgtttatcactccctaattcagggtttctgtgcatatggcgattcggtgaaagcaaaggagttggtttatgaaatgataaacaatggttttcctcgtcctaacattgtgttcttcagttcaataataaatagtctatgcaaagaaggaaaggttatagatgcacaagatatcttcaacttggttgtagaaataggtgagagtcctgatgtcactatatttacttcactaattgaaggattttgcctagtcggcaaaatggagaaagcatcccaagtgtttgattccatggtatcagttggcattgagcctaatattgttacatatggtacacttgttgatggctattgtagaagtggaaggatagatgatgggttgattctattcagagatttgcttcacaagggagttaaacctacaacaattacatattacatcatactggatgggttatttcttgctgggagaacagttgctgccaagaaaatgttccatgagatgatcggaagtggaacacccgtgagcctgcacacatatgatataattcttggaggtctttgtaggaataattgtgctgacgaagcgattaccctgttccagaaattagtagcgatgaatgtgaagttggatattacaatacacaataccatgatcaatgcaatgttcaaagttcagagaagagaaaaagctaacgatttttgctgcagtatcagccagtggattggtacc

SEQ ID NO: 2770 - DNA, 732 bp, Triticum aestivum
  source 1..732: mol_type = genomic DNA
atgatggatgaagctatgctcatattttctggaatgtgcggacaaggagtgactccagagtctagaatggctaggctggctgatgcttcgaataagttcagtcagatgatttcaactgatatacaaccgaacacagttgtttatcactccctaattcagggtttctgtgcatatggcgattcggtgaaagcaaaggagttggtttatgaaatgataaacaatggttttcctcgtcctaacattgtgttcttcagttcaataataaatagtctatgcaaagaaggaaaggttatagatgcacaagatatcttcaacttggttgtagaaataggtgagagtactgatgtcactatatttacttcactaattaaaggatattgcctagtcggcaaaatggagaaagcatcccgagtgtttgattccatggtatcagttggcattgagcctaatattgttacatatggtacacttgttgatggctattgtagaagtggaaggatagatgatgggttgattctattcagagatttgcttcacaagggagttaaacctacaacaattacatattacatcatactggatgggttatttcatgctgggagaatagttgctgccaagaaaatgttccatgagatgatcggaagtggaacacccgtgagcctgcacacatatgatataattcttggaggtctttgtaggaataattgtgctgacgaagcgattaccctgttc

SEQ ID NO: 2771 - DNA, 864 bp, Triticum aestivum; identical to SEQ ID NO: 2769
  source 1..864: mol_type = genomic DNA

SEQ ID NO: 2772 - DNA, 864 bp, Triticum aestivum; identical to SEQ ID NO: 2769
  source 1..864: mol_type = genomic DNA

SEQ ID NO: 2773 - DNA, 732 bp, Triticum aestivum; identical to SEQ ID NO: 2770
  source 1..732: mol_type = genomic DNA

SEQ ID NO: 2774 - DNA, 864 bp, Triticum aestivum; identical to SEQ ID NO: 2769
  source 1..864: mol_type = genomic DNA

SEQ ID NO: 2775 - DNA, 876 bp, Triticum aestivum
  source 1..876: mol_type = genomic DNA
atgtcgcgcctccatccccgctacttctccagctccgtctcctcactcgccgacgagctgctgagcgaattccagcatcatctgggctcagggacgctcagtccgcagctcgcacaccaactgttcgacggattgctgcgccaaccagtcccagtatcagcgcgtgcactcaatggcttatttgctgccctcgcgcgtacgccgccctccaccacctgcgcagatggccctgcccgcgccatcgatctcttcaaccgcatggcccgagcaggccgccgccgcagggtgatagcacccaccagtcacacctacagcatactaattgaatgctgctgccttgcacgccgtccggaccttgggccttccttcttcgctcacctcctcaagacaggcgtcacggcagacgtcgtcatcttcagtggcttattcaagtgcctttgtgacatgaagcgcacggaggaggctctggatgtgctgcttcatagggtgcctcacgacctgcctaatgtcatctcctactcagtaattgtcaagagcctctgcgacaatgggaggagccagcttgcgcttgacctgctccatataatggccaaaaaaggtgctgaccactcccctaacgtggtgtcatacaacatggtaatcgatggcttttttaaggagggtgaaacaagcaaagcatgcgatctgctccaggaaatgattcagcagggggttgtgcccgatgtggtgatgtatagctccattatcgatgcactgtgcaaagcaagagcaatggacaaggcagaggtggtccttcgacaaatggttcatgatggtgatgtgacagcggcccgatctttcgatgagagtggggataattatcgatttggtggattt

SEQ ID NO: 2776 - DNA, 702 bp, Triticum aestivum
  source 1..702: mol_type = genomic DNA
atggataaggcagagctgatccttcgacatatggttcatagtggtgtccaaccacatgataggatatataataccctgatccatgggtttttaactttgggtcagcagaaagaagcctttaggttgttggaactgatgacaagccaaggtgttatgccaaatgttgtgacttgcaactcagtcatggactacctttgcaagcatggaagagtcaaagaagctgcagaaatattttattccatggttgtgaagggccaaaaacctaatgtcatctcatactctgttatgctccacgggtatgctaaagaaggatcccttgttgctatgattgatctctgtgagctgatggcaagagatggagttgttcccgaccgctcttttttcaacatactgattaaggcatatgctaaatatggaatgatcgatgtggctatgcttttctttgatgaaatgttgaagcagggggtgaaccctaatgatatcacatatttaactctgatatctgcattttgcaagatgggcagaatggatgatgctatgatcaaattcaatgagatgattgatatgggaataccacatgatacaactgtttacatgtgcatgattgagggctatttgaatcatggtgattccgtcaaagccaaggaattcattactaaaatgaagagcagggatgtttgtcatagcccacggaagggtaat

SEQ ID NO: 2777 - DNA, 840 bp, Triticum aestivum
  source 1..840: mol_type = genomic DNA
atggtaatggatggcttttttaaggagggtgaagtaagcaaagcatgtgatctattccacgaaatgatacagcagggggttgtgcctactgaggtgacatatagctccattatcaatgcgctatgcaaagcaagagcaatggataaggcagagctgatccttcgacatatggttcatagtggtgtccaaccacatgataggatatataataccctgatccatgggtttttaacttcgggtcagcagaaagaagcctttaggttgttgaaactgatgacaagccaaggtgttatgccaaacgttgtgacttgcaactcagtcatggactacctttgcaagcatggaagagtcaaagaagctgcagaaatattttattccatggttgtgaagggccaaaaacctaatgtcatctcatactctgttatgctccacgggtatgctaaagaaggatcccttgttgctatgattgatctctgtgagctgatggcaagagatggagttgttcccgaccgctcttttttcaacatactgattaaggcatatgctaaatatggaatgatcgatgtggctatgcttttctttgatgaaatgttgaagcagggggtgaaccctaatgatatcacatatttaactctgatatctgcattttgcaagatgggcagaatggatgatgctatgatcaaattcaatgagatgattgatatgggaataccacatgatacaactgtttacatgtgcatgattgagggctatttgaatcatggtgattccgtcaaagccaaggaattcattactaaaatgaagagcagggatgtttctcatagcccacggaagggtaat

SEQ ID NO: 2778 - DNA, 702 bp, Triticum aestivum; identical to SEQ ID NO: 2776
  source 1..702: mol_type = genomic DNA

SEQ ID NO: 2779 - DNA, 702 bp, Triticum aestivum; identical to SEQ ID NO: 2776
  source 1..702: mol_type = genomic DNA

SEQ ID NO: 2780 - DNA, 840 bp, Triticum aestivum; identical to SEQ ID NO: 2777
  source 1..840: mol_type = genomic DNA

SEQ ID NO: 2781 - DNA, 702 bp, Triticum aestivum; identical to SEQ ID NO: 2776
  source 1..702: mol_type = genomic DNA

SEQ ID NO: 2782 - DNA, 678 bp, Triticum aestivum
  source 1..678: mol_type = genomic DNA
atgccgccttcgccactgccacagagcgtgtctgccggcacgctcagtccgaagcacgtgcaccacctgttcgacaaattgcttcggcaggccactccggtccccgagcgctccctgaacggcttccttgccgccctcgcgcacgcgccggactcctccgcgtgcaaagacggccccgccctcgtcctcgccatcttcaaccgcgtctcccgagaagaagccggcctgcgggtggccacgcccgccatctgcacctactgcatcctcatggactgctgctgccgcgcgcgtcgccgggacctagggcttgccttcttcggccgcctcatgaggacgggcctcaagacaaaccagatcgccgccaacaacctcctcaagtgcctctgccacgcaaaacggaccgacgaggctgtcagcgtgctgcttcataggatgtccgacctcggttgtgcgcctaactgcatctcatacaacacagttctaaagagcttgtgcgaagatagcaggagccagcaagcgctcgacctgctccagatgatggcaaaagaaggaggtgtctgctcccctagtctggtcaaatataacacggtcatccacggcttcttcaaggaaggacaagtaagcaaggcatgcaatctataccatgaaatgatgagcaaggggttgtgcctgatgtgg

SEQ ID NO: 2783 - DNA, 789 bp, Triticum aestivum
  source 1..789: mol_type = genomic DNA
atgcctcgccgcctctactccaccaggcccatgtcctacacccgtctctgccgccggttgtcctcctcctccaccaccacctcttcgtcgtcaccctcctggtgtccccatgccgccttcgccactgccacagagcgtgtccgtgccggcacgctcagtccggagcacgtgcaccacctgttcgacaaattgcttcggcaggccactccggtccccgagcgctccctgaacggcttccttgccgccctcgcgcacgcgccggactcctccgcgtgcaaagacggccccgccctcgtcctcgccatcttcaaccgcgtctcccgagaagaagccggcctgcgggtggccacgcccgccatctgcacctactgcatcctcatggactgctgctgccgcgcgcgtcgccgggacctagggcttgccttcttcggccgcctcgtgaggacgggcctcaagacaaaccagatcgccgccaacaacctcctcaagtgcctctgccacgcaaaacggaccgacgaggctgtcagcgtgctgcttcataggatgtccgacctcggttgtgcgcctaactgcatcttatacaacacagttctaaagagcttgtgcgaagatagcaggagccagcaagcgctcgacctgctccagatgatggcaaaagaaggaggtgtctgctcccctagtctggtcaaatataacacggtcatccacggcttcttcaaggaaggacaagtaagcaaggcatgcaatctataccatgaaatgatgagcaaggggttgtgcctgatgtgg

SEQ ID NO: 2784 - DNA, 789 bp, Triticum aestivum; identical to SEQ ID NO: 2783
  source 1..789: mol_type = genomic DNA

SEQ ID NO: 2785 - DNA, 678 bp, Triticum aestivum; identical to SEQ ID NO: 2782
  source 1..678: mol_type = genomic DNA

SEQ ID NO: 2786 - DNA, 678 bp, Triticum aestivum; identical to SEQ ID NO: 2782
  source 1..678: mol_type = genomic DNA

SEQ ID NO: 2787 - DNA, 552 bp, Triticum aestivum
  source 1..552: mol_type = genomic DNA
atgtcccgcgtctgcctctgccgccgcctctcctccacctccacctccaacacgccaccctcaccttcctggtcaccccaggccgcctttgccgcggccacggagcgcgcccgcgccggaacgctcagccctcaagacgcacaccacctgttcgacgaattgtttcggcaggccacaccggttcccgagcgctcccttgatggattccttgccgccctcggccgtgctgcgtcctctgaagcctgcagagacggcccctccctcgccctcactctcttcaaccgtctctgccgagaagaagccggccggcgggtggcgccgcccacaatctacacctacggcatcctgatgaactgctgctgccgcgtgcgtcgtccagacctagggctcgccttcttcggccgcctcctaaggaccggcctcaaaacaaatgaggtcgtcgccagcaccctcctcaagtgcctctgctgtgcaaaacgggcagatgaagctgtgaacgtgctgcttcataggatgtccgtcgctgtgtgcctaattccttctcatacaaca

SEQ ID NO: 2788 - DNA, 840 bp, Triticum aestivum
  source 1..840: mol_type = genomic DNA
atgatacacggatattccacgttgggccggtggaaagaaacgggcaaaatgttcagagaaatgacaagccggggtatcataccagatgttgttagttggacctcattcatgacctccctctgcaagcatggaagaagcagagaagctactggaattattgattacatgtctgccaagggccacaagcctaatattgtctcgtactctattctgtttcatggatatgctacagaaggatgctttgatgatatgattaatctccttgactcaatggcaaccaacggtattgttcccaatcgccagattttcagcattttagttgatgcgtatgctaaacgtggaatgatggatgaagctatgctcatatttactggaatgtgggaacaaggagtgatcccagatgtatccagatggggacaaggagtgagtccagagtctacaatttttaggctggctgatgctttgaacaagttcagtcagatgatttctattgatataaaaccggacacagttgtttatcactccctaattcagggtttctgcacacatggcgatttggtgaaagcaaaggagttggtttatgaaatgataaacaaatacattccacctcctaccgttgtgttcttcagttcaataataaatagtctatgcaaagaaggaagggttacagatgcacaagatatcttcaacttggttgttgaaataggtgagagtcctgatgtctttgcttttacttcactacttgacagatattgcctagtcggcaaaatggagaaagcatcacaagttttgatgcaatggtatcagctggcattgagcctaatgcatccacctaaagcg

SEQ ID NO: 2789 - DNA, 840 bp, Triticum aestivum; identical to SEQ ID NO: 2788
  source 1..840: mol_type = genomic DNA

SEQ ID NO: 2790 - DNA, 840 bp, Triticum aestivum; identical to SEQ ID NO: 2788
  source 1..840: mol_type = genomic DNA

SEQ ID NO: 2791 - DNA, 840 bp, Triticum aestivum; identical to SEQ ID NO: 2788
  source 1..840: mol_type = genomic DNA

SEQ ID NO: 2792 - DNA, 786 bp, Triticum aestivum
  source 1..786: mol_type = genomic DNA
atgctcaggccagagctcgcgcaccaactgttcgacgaaatgctgcgccaacctgtcccagtatcagctcgtgcactcagcggcttatttgctgcacttgcgcgtgcgccgccctcacctgtgtgcaccgatagccctgccctcgccattgatctcttcaacctcatggcccgagcaggccgtcgccaggcaacaacacccaccatttacacctacatcatactaatggagtgttgccaccgagcatgccgcccagacctagggattgccttcttcggccgcctcctcaagacaggcatcccgacaaacatcattacctacagcagcttgttcaagtgcctctgtgacatgaagcgcacagaggaggctctgaacgtgctgctccataagatgcccgacgacctgcctaatgtcatctcctactcagtgattctcaagagcttctgcgacaatgggaggatccagcttgcgcttgatctgctccagatgatggccaaaaaaggcgctgaccactcccccgacgtgatgtcatacaacatggtaattgatggcttctttaaggagggtgaagtaagcaaagcatgcaatctattccaagaaatgatacgacaggggattgtgcctactgaggtgacatatagctccattatcaatgcgctatgcaaagcaagagcaatggacaaggcagaggtggttcttcgatcaatggttcataatggtgcccaaccagatgttgtgacatataatagcttgatccaaggatattcaactttgggacagttgaaa

SEQ ID NO: 2793 - DNA, 747 bp, Triticum aestivum
  source 1..747: mol_type = genomic DNA
atgctgcgccaacctgtcccagtatcagctcgtgcactcagcggcttatttgctgcacttgcgcgtgcgccgccctcacctgtgtgcaccgatagccctgcccttgccattgatctcttcaactgcatggcccgagcaggccgtcgccaggcaacagcacccaccatttacacctacatcatactaatggagtgttgccatcgagcatgtcgcccagacctagggcttgccttcttcggccgcctcctcaagacaggcatcccgacaaacatcattacctacaacagcttgttcaagtgcctctgtgacatgaagcgcacagaggaggctctgaacgtgctcctccataagatgcccgacgacctgcctaatgtcatctcctactcagtgattctcaagagcttctgcgacaatgggaggatccagcttgcgcttgatctgctccagatgatggccaaaaaaggcgctgaccactcccccgacgtgatgtcatacaacatggtaattgatggcttctttaatgagggtgaagtaagcaaagcatgcaatctattccaagaaatgatacgacaggggattgtgcctactgaggtgacatatagctccattatcaatgcgctatgcaaagcaagagcaatggacaaggcagaggtggttcttcgatcaatggttcataatggtgcccaaccagatgttgtgacatataatagcttgatccaaggatattcaactttgggacagttgaaa

SEQ ID NO: 2794 - DNA, 786 bp, Triticum aestivum; identical to SEQ ID NO: 2792
  source 1..786: mol_type = genomic DNA

SEQ ID NO: 2795 - DNA, 786 bp, Triticum aestivum; identical to SEQ ID NO: 2792
  source 1..786: mol_type = genomic DNA

SEQ ID NO: 2796 - DNA, 747 bp, Triticum aestivum; identical to SEQ ID NO: 2793
  source 1..747: mol_type = genomic DNA

SEQ ID NO: 2797 - DNA, 786 bp, Triticum aestivum; identical to SEQ ID NO: 2792
  source 1..786: mol_type = genomic DNA

SEQ ID NO: 2798 - DNA, 837 bp, Triticum aestivum
  source 1..837: mol_type = genomic DNA
atggactgttgctgccgcgcgtgccgcccggatctggcgctcgctttcttcggccgtctcttcaggacgggcctggaggcaaaccaagtcatcttctgcaccctcctcaagggactctgccacgcaaagcgcacagatgaggctctggacgtgctgcttcacaggatgcctgagctgggctgcactcccgatgtggtggcatataacaccgtcatccatggcttctttagggaaggccaagtaggcaaggcgtgcgatctgttccatggaatggcacagcagggcgttatgcccgatgtggtgacatatagctcggttattgatgcgctgtgcaaggccagagcaatggacaaagcagagtatttccttcgtcagatgattggtaatggtgtcgtacctaataatgtggcatataatagcctcatccatggatattcctcttcaggccattggaaggaggcagttagggtattcaaagagatgacaagtcggagggttacagcagatgtgcatacttacaacatgtttatgacctttctttgcaaacatggaagaagcaaagaagctgcaggaatttttgataccatggctatgaagggcctgaaacctgacaacgtttcatatgctattctccttcatgggtatgccaccgaaggatgcttagttgatatgattaatctcttcaattcaatggaaagagactgtattctacttgactgttgtatcttcagcatactgattaatgcatatgctaaatctgggaagcttgataaggcaatgcttttatttaaagaaatgcagaaacaaggagtgaatctgcattcacatattcaaccg

SEQ ID NO: 2799 - DNA, 837 bp, Triticum aestivum; identical to SEQ ID NO: 2798
  source 1..837: mol_type = genomic DNA

SEQ ID NO: 2800 - DNA, 837 bp, Triticum aestivum; identical to SEQ ID NO: 2798
  source 1..837: mol_type = genomic DNA

SEQ ID NO: 2801 - DNA, 837 bp, Triticum aestivum; identical to SEQ ID NO: 2798
  source 1..837: mol_type = genomic DNA

SEQ ID NO: 2802 - DNA, 837 bp, Triticum aestivum; identical to SEQ ID NO: 2798
  source 1..837: mol_type = genomic DNA

SEQ ID NO: 2803 - DNA, 837 bp, Triticum aestivum; identical to SEQ ID NO: 2798
  source 1..837: mol_type = genomic DNA

SEQ ID NO: 2804 - DNA, 822 bp, Triticum aestivum
  source 1..822: mol_type = genomic DNA
atgaaacagcgggggttcgtgcctgatgtggggacatataattccattattgatgcaatgtgcaaagcaagagcaatggacaaggcaaaattggtccttcgacaaatggttgatagtggggttcgaccggatattgtgacatataataaactgattcatggatattccatttcgggccagtttgaagaggtcgttacgttgttggaaaaaatgagaagtcaaggtgtcaaaccaactgtttttacttgcaacacagtcatggactacctttgcaagcatggaagaatcaaagaagctgcagaatttttttattccatggttgagaagggccataaacctaatatagtctcatatgctattatgcttcatgggtacgctaaagaaggatcccttgttgaaatgactgatctctgtgagctgatggcaagagatggtattgtatcctatctccattgtttcaacatactgattaatgcatatgctaagtgtggaatgatggatgtggctattcttttcttcaaagacatgttgaagcagggagtgaaccctgatgaagtcacatatttagcagtgatagctgggtattgcagagtgggcatgatggatgatgctatggaaaaattcaatgagatgatcggtatgggagtaccacataatgcaactgtttacaggtgcatgattcagggttacttaaatcatggtgatttcttgaaagcaaaggaattgattactgaaatgaagaccaagggtatccatcctagactgtcgaaaagccaaggaattgatccagggtacctcatgagtcaactgtttccaggtgca

SEQ ID NO: 2805 - DNA, 822 bp, Triticum aestivum; identical to SEQ ID NO: 2804
  source 1..822: mol_type = genomic DNA

SEQ ID NO: 2806 - DNA, 822 bp, Triticum aestivum; identical to SEQ ID NO: 2804
  source 1..822: mol_type = genomic DNA

SEQ ID NO: 2807 - DNA, 822 bp, Triticum aestivum; identical to SEQ ID NO: 2804
  source 1..822: mol_type = genomic DNA

SEQ ID NO: 2808 - DNA, 822 bp, Triticum aestivum; identical to SEQ ID NO: 2804
  source 1..822: mol_type = genomic DNA

SEQ ID NO: 2809 - DNA, 822 bp, Triticum aestivum; identical to SEQ ID NO: 2804
  source 1..822: mol_type = genomic DNA

SEQ ID NO: 2810 - DNA, 849 bp, Triticum aestivum
  source 1..849: mol_type = genomic DNA
atgccttgtgcaaggtcagggcaatggacaaggcaaagctggtccttcagcagatggttgataatggtgttcgaccaaatatgtatacatgcatggaactcattcatgtactccctttgcaagaatggaggaagcaaagaagctgcagaattttttgactccatgacctccaagggcctcaaacctaatatcgtcgtgtactctactcttcttcacgggtatgctactgaaggatgcctagccgatatgattaatctctttaattcaatgaaagacaatgctattgtagccaactgcaatgttttcaacatattaattgatgcatatgctaaacgtggaatgatgcatgaagctatgctcatatttactgaaatgcaggaacaaagagtgagtcctaatgtattcacctatgcaattgtaacagctgcactttgcagaatgggcaggctgtctgatgcaatggacaaactaaatgagatgattgcaatgggattacaaccgaacaaggttgtttatcattctctaattcagggtttttgtacacatggtgatttggtgaaagcaaaggccttggtttctgaaatgatgaacaaaggtattcctcgtccaaacattgtgttcttcagctcagtaataaacagtctatgcaaggaaggaagggttaccgaggcacacgatatcttcgacttggctataaacattggcgagaggcctaacgttattacatttagttcactgattgacggatattgtttagccgggaagatggataaagcattcggagtactagatgctaacacttttgagtatttcaaggaaaatatgtgcaagagaataagtagatggaag

SEQ ID NO: 2811 - DNA, 849 bp, Triticum aestivum; identical to SEQ ID NO: 2810
  source 1..849: mol_type = genomic DNA

SEQ ID NO: 2812 - DNA, 849 bp, Triticum aestivum; identical to SEQ ID NO: 2810
  source 1..849: mol_type = genomic DNA

SEQ ID NO: 2813 - DNA, 849 bp, Triticum aestivum; identical to SEQ ID NO: 2810
  source 1..849: mol_type = genomic DNA

SEQ ID NO: 2814 - DNA, 849 bp, Triticum aestivum; identical to SEQ ID NO: 2810
  source 1..849: mol_type = genomic DNA

SEQ ID NO: 2815 - DNA, 849 bp, Triticum aestivum
  source 1..849: mol_type = genomic DNA
atgccttgtgcaaggtcagggcaatggacaaggcaaagctggtccttcagcagatggttgataatggtgttcgaccaaatatgtatacatgcatggaactcattcatgtaccccctttgcaagaatggaggaagcaaagaagctgcagaattttttgactccatgacctccaagggcctcaaacctaatatcgtcgtgtactctactcttcttcacgggtatgctactgaaggatgcctagccgatatgattaatctctttaattcaatgaaagacaatgctattgtagccaactgcaatgttttcaacatattaattgatgcatatgctaaacgtggaatgatgcatgaagctatgctcatatttactgaaatgcaggaacaaagagtgagtcctaatgtattcacctatgcaattgtaacagctgcactttgcagaatgggcaggctgtctgatgcaatggacaaactaaatgagatgattgcaatgggattacaaccgaacaaggttgtttatcattctctaattcagggtttttgtacacatggtgatttggtgaaagcaaaggccttggtttctgaaatgatgaacaaaggtattcctcgtccaaacattgtgttcttcagctcagtaataaacagtctatgcaaggaaggaagggttaccgaggcacacgatatcttcgacttggctataaacattggcgagaggcctaacgttattacatttagttcactgattgacggatattgtttagccgggaagatggataaagcattcggaatactagatgctaacacttttgagtatttcaaggaaaatatgtgcaagagaataagtagatggaag

SEQ ID NO: 2816 - DNA, 849 bp, Triticum aestivum; identical to SEQ ID NO: 2810
  source 1..849: mol_type = genomic DNA

SEQ ID NO: 2817 - DNA, 762 bp, Triticum aestivum
  source 1..762: mol_type = genomic DNA
atggtctcagytggcttgagacctgacagtttttcttatgatacattgcttaatggctattgtaaagctggcaggatagataatgcatgttgtctttwmygagaaatgttgakgmmkggagttrygmctkrmratrmkacttacaatactatactgaatggcttgtttaggagtgggagattttctgaagcaagggaactctacgtcaatatgattaaaagtaggaaactgtggtccatttgcacatacagtataattcttgatgggttttgcaaaaacaattgttttgatgaagcattcaaaatatttcagagcctctgttctatggatcttcaacttgacataattacttttaacatcatgattgatggtttgttcaaaggtggcagaaaggaagatgccatggatttgttygctactatctctgcttatggtttggttccagatgttgtgacctaccgcttaatagcagaaaatctcatagaagaagggtcgctaggggagtttgatggtctgttttcagcaatggaaaagagtggtactgctccaaactcacatatgttaaatgctctagttaggaggttgttgcatagaggtgacataagcagggctggggtttacctctacaaacttgatgagaagaatttttcacttgaggcttccactacttccatgcttatatcactttactcgaggggtgaatatcagccacatgcaaagtcgctgcctgaaaagtatcgtttcctcattgaagccaacagt

SEQ ID NO: 2818 - DNA, 558 bp, Triticum aestivum
  source 1..558: mol_type = genomic DNA
atgccccgcattcccctctgcaactccaccatgcccatgtcccgcatcggcctccgccgccgccgactttcctcctccttctccacctccacctccaccgcgcgatcctcacggtcatggtctccccacgccgcatttgccgcggccacggagcgcgtccgcgccgggacgctcagcccggaggacgcacaccacctgttcgaccaattgctacggcaggacactccggtccaggagcgctccctgggcggcttccttgccgccctcgcccgtgcgccagactcagcttcctgcagagatggcccctccctcgccctctccctcttcaaccgcgtatgccgagaagaagcaggccggcgggtggcgccgcccacagcctacacctacgccatcctgatgaactgctgctgccgcgtgcgtcgtccagacctagggcttgccttatttggccgcctcctaaggacaggcctcaaaacaaatgagatcgtcgccaacaccctcctcaagtgcctcttgctgcgcaaaacggacagacgaggctgtcagcgtgctgcttca

SEQ ID NO: 2819 - DNA, 558 bp, Triticum aestivum; identical to SEQ ID NO: 2818
  source 1..558: mol_type = genomic DNA

SEQ ID NO: 2820 - DNA, 669 bp, Triticum aestivum
  source 1..669: mol_type = genomic DNA
atgccccgcattcccctctgcaactccaccatgcccatgtcccgcatcggcctccgccgccgccgactttcctcctccttctccacctccacctccaccgcgcgatcctcacggtcatggtctccccacgccgcatttgccgcggccacggagcgcgtccgcgccgggacgctcagcccggaggacgcacaccacctgttcgaccaattgctacggcaggacactccggtccaggagcgctccctgggcggcttccttgccgccctcgcccgtgcgccagactcagcttcctgcagagatggcccctccctcgccctctccctcttcaaccgcgtatgccgagaagaagcaggccggcgggtggcgccgcccacagcctacacctacgccatcctgatgaactgctgctgccgcgtgcgtcgtccagacctagggcttgccttatttggccgcctcctaaggacaggcctcaaaacaaatgagatcgtcgccaacaccctcctcaagtgcctctgctgcgcaaaacggacagacgaggctgtcagcgtgctgcttcataggatgtccaagctaagcttggttgtgtgcctgatgccatctcatacaacacagttcttaagagcttatgtgataatagcagcagccagcgggcgctcgacctccttcaga

SEQ ID NO: 2821 - DNA, 669 bp, Triticum aestivum; identical to SEQ ID NO: 2820
  source 1..669: mol_type = genomic DNA

SEQ ID NO: 2822 - DNA, 558 bp, Triticum aestivum; identical to SEQ ID NO: 2818
  source 1..558: mol_type = genomic DNA

SEQ ID NO: 2823 - DNA, 558 bp, Triticum aestivum; identical to SEQ ID NO: 2818
  source 1..558: mol_type = genomic DNA

SEQ ID NO: 2824 - DNA, 678 bp, Triticum aestivum; identical to SEQ ID NO: 2782
  source 1..678: mol_type = genomic DNA

SEQ ID NO: 2825 - DNA, 411 bp, Triticum aestivum
  source 1..411: mol_type = genomic DNA
atgccgagaagaagctggcccgcgggtggcgcagcccacaatcttcacctacggcgtcctcatgaactgatgcgtccgcactcgtccgcactcgggcttgttttcttcggccgtctcctcaggaggggcctgaagacaaacacgattgtcttcagctccctcctcaagtgcctctgtcacgccaaacggacagacgaggctgtcagcgtgctgcttcataggatgtctgagcttggttgtgtgcctgatgccttctcatacaccattgttcttaagagcttatgtgatggtagcagcagccagcgggcgctcgacctgctccagatgatggagaaaggagaaggtgtctgctctcccctggcgtggtgttatataccacggtcatccacggcctccttaaggaaggggaag

SEQ ID NO: 2826 - DNA, 411 bp, Triticum aestivum; identical to SEQ ID NO: 2825
  source 1..411: mol_type = genomic DNA

SEQ ID NO: 2827 - DNA, 765 bp, Triticum aestivum
  source 1..765: mol_type = genomic DNA
atgttggatcgcggcatctgtcccgacacagtgttcttcaacacaattatggaccgcctttgcaaaaatgaaagggttatggaagcccaagatctcttcgacctgatggtacacatgggtgtgaagcctgatgtatgtacttataacacactgataggtggatacttgtttgttggtaagatggatgaagtgagcaagttacttgacaatatggtctcaattggcatggaaccagatgttatcacctataacatactgattgatggttactctaagaatggaaagatagatgatgcattggttgtttttagggggatattggaaaggaaggataagccttctgttatcacttttaatattatgattggtgcgttgcttaaatgtcgcaggaaggaagaagcaaaagatttgtttgacggtatctgggccaaaggattagttcctgatgttgttacatatagcttaatgatacaaaaacttatagaagaaggttctctacaggagtctgatgatctattcctttctatggagaagaatggttatcctgccaattcctgcatgctaaatgctatagttagaaggttacttcagaaaggggagatgcccagggctgggacttatttgtctaaaattgatgagaggaatttcacccttgaagcttccacaactagcttgttgactgcacttgcttcagtggggaaatgtcaggaatataaggggttactgcctgaaaaatatcattgttttctggaacagggcactgat

SEQ ID NO: 2828 - DNA, 765 bp, Triticum aestivum; identical to SEQ ID NO: 2827
  source 1..765: mol_type = genomic DNA

SEQ ID NO: 2829 - DNA, 765 bp, Triticum aestivum; identical to SEQ ID NO: 2827
  source 1..765: mol_type = genomic DNA

SEQ ID NO: 2830 - DNA, 765 bp, Triticum aestivum; identical to SEQ ID NO: 2827
  source 1..765: mol_type = genomic DNA

SEQ ID NO: 2831 - DNA, 765 bp, Triticum aestivum; identical to SEQ ID NO: 2827
  source 1..765: mol_type = genomic DNA

SEQ ID NO: 2832 - DNA, 765 bp, Triticum aestivum; identical to SEQ ID NO: 2827
  source 1..765: mol_type = genomic DNA

SEQ ID NO: 2833 - DNA, 780 bp, Triticum aestivum
  source 1..780: mol_type = genomic DNA
atgaactattttctgagatgttggatcgcggcatttgtcccaacagtgttcttcaacacaattatggaccgcctttgcaaaaatgaaagggttatggaagcccaagatctcttcgacctgatggtacacatgggtgtgaagcctgatgtgtgtaattataacacactgataggtggatacttgttcgatggtaagatggatgaagtgaggaagttacttgacaatatggtctctattggcttgaaaccagatgttatcacatataccatactgattgatggttactctaagaatggaaggatagatgatgcattggttgtttccagggaaatgttggccgggaacgttaagccttgtgttatcactttgaatattatgattggtgcgttgcttaaaggtggcaggaaggaagaggctaaagatttgtttgatggtatctgggccaaaggattagtgcccaccgttgttacatatagcttaatgatacaaaaacttatagaagaaggttctctacaagagtcggatgatctattcctttctatggagaagaatggatgtgctgccgactcccatatgctaaatgctatagttagaagcttacttcggaaaggggaggtgcccagggctgggacttatctgtctaaaattgatgagaggaggttcacccttgaagcttccacagctagcttgttggctgcagttgcgtcaggggggaaaggccaggaatataaggagttactccccgaaaaataccactattttctggaacagggcactgat

SEQ ID NO: 2834 - DNA, 780 bp, Triticum aestivum; identical to SEQ ID NO: 2833
  source 1..780: mol_type = genomic DNA

SEQ ID NO: 2835 - DNA, 780 bp, Triticum aestivum; identical to SEQ ID NO: 2833
  source 1..780: mol_type = genomic DNA

SEQ ID NO: 2836 - DNA, 780 bp, Triticum aestivum; identical to SEQ ID NO: 2833
  source 1..780: mol_type = genomic DNA

SEQ ID NO: 2837 - DNA, 780 bp, Triticum aestivum; identical to SEQ ID NO: 2833
  source 1..780: mol_type = genomic DNA

SEQ ID NO: 2838 - DNA, 780 bp, Triticum aestivum; identical to SEQ ID NO: 2833
  source 1..780: mol_type = genomic DNA

SEQ ID NO: 2839 - DNA, 681 bp, Triticum aestivum
  source 1..681: mol_type = genomic DNA
atgtccgacctcggctgtgtgcctaactgcatctcacacggcatagttctaaagagcttgtgcgaagatagcaggagccagcaagcgctcgacctgctccggatgatggcaaaagaaggaggtgcctgctcccctagtctggtcacatataacacggtcatccacggcttcttcaaggaaggacaagtaagcaaggcatgcaatctataccatgaaatgatgcagcaaggggttgtgcctgatgtggtgacgtataactcgattattgatgcgctgtgcaaggccagagctatgggcaaggcagagttgttcctaaggcagatggttgataacggtgttcgaccagataacgtgacatatactgcagtaatccatggatattccactttgggccagtggaaaaaggcggctaaaatgtttagagaaatgacaagcctcggtcttgtaccaaatactgtcacttggaactcatccatggcctccctctgcaagcatggaagaagcaaagaagctgcagaaatttttcattccatggctgcgaagggccacaagcctgatgtcgtctcgtatcgtgttctgctccaagggtatgctacagagggtgctttgcagatatggttgatctctataattcaatgtcaagcaatggtattgtacccaatcgccaggttttcaacatat

SEQ ID NO: 2840 - DNA, 681 bp, Triticum aestivum; identical to SEQ ID NO: 2839
  source 1..681: mol_type = genomic DNA

SEQ ID NO: 2841 - DNA, 816 bp, Triticum aestivum
  source 1..816: mol_type = genomic DNA
atgtcatgtgtatacctgaaaaactttcctgctgcacacgttcaacaccgccaccaaaacggcaggacaactgacccgcgatcaatttgccacttcccagaccaggcgcgtcctccccacccccgacggctcacgcgccgccgccgccgccgccgccgccgctcctcctcctccacatccacctacccgcaaccgccaggtgtccagcttccgcctccacctccgcaactccttctctcccaccccgcccatgtgaccatgttccgcatgcgcctccgcaactcctccaccatgcccatgtcccgcatcggcctcctcctccgccgcctctcctcctcctcctcctcctcctacttctccacctccacctcgccaccctcacggtcacggtcatggtctccccgcgacgcctttgccgcggccacggagcgcgtccgtgccgggacgctcagcccggaggacgcacaccacctgtttgaccaattgctacggcaggacactccggtccacgagcgctccctgggcggcttccttgccgccctcgcccgtgcgccagactcggctgcctgcagagatggccccgccctcgccatcgccctcttcaaccgcgtatgccgagaagaagcaggcaggccggtggtgccgcccacagtctacacctacgccatcctgatgaactgctgctgccgcgtgcgtcgtccggacctagggcttgccttatttggccgcctcctaaggacaggcctcaaacaaatgagatcgtcgccagcaccgtcctcaagtgcctctgctgcgcaaaacggacagatgaagcag

SEQ ID NO: 2842 - DNA, 816 bp, Triticum aestivum
  source 1..816: mol_type = genomic DNA
atgtcatgtgtatacctgaaaaactttcctgctgcacacgttcaacaccgccaccaaaacggcaggacaactgacccgcgatcaatttgccacttcccagaccaggcgcgtcctccccacccccgacggctcacgcgccgccgccgccgccgccaccgccgctcctcctcctccacatccacctacccgcaaccgccaggtgtccagcttccgcctccacctccgcaactccttctctcccaccccgcccatgtgaccatgttccgcatgcgcctccgcaactcctccaccatgcccatgtcccgcatcggcctcctcctccgccgcctctcctcctcctcctcctcctcctacttctccacctccacctcgccaccctcacggtcacggtcatggtctccccgcgacgcctttgccgcggccacggagcgcgtccgtgccgggacgctcagcccggaggacgcacaccacctgttcaaccaattgctacggcaggacactccggtccacgagcgctccctgggcggcttccttgccgccctcgcccgtgcgccagactcagctgcctgcagagatggccccgccctcgccatcgccctcttcaaccgcgtatgccgagaagaagcaggccggccggtggtgccgcccacagtctacacctacgccatcctgatgaactgctgctgccgcgtgcgtcgtccggacctagggcttgccttatttggccgcctcctaaggacaggcctcaaacaaatgagatcgtcgccagcaccgtcctcaagtgcctctgctgcgcaaaacggacagatgaagcag

SEQ ID NO: 2843 - DNA, 816 bp, Triticum aestivum; identical to SEQ ID NO: 2842
  source 1..816: mol_type = genomic DNA

SEQ ID NO: 2844 - DNA, 816 bp, Triticum aestivum
  source 1..816: mol_type = genomic DNA
atgtcatgtgtatacctgaaaaactttcctgctgcacacgttcaacaccgccaccaaaacggcaggacaactgacccgcgatcaatttgccacttcccagaccaggcgcgtcctccccacccccgacggctcacgcgccgccgccgccgccgccaccgccgctcctcctcctccacatccacctacccgcaaccgccaggtgtccagcttccgcctccacctccgcaactccttctctcccaccccgcccatgtgaccatgttccgcatgcgcctccgcaactcctccaccatgcccatgtcccgcatcggcctcctcctccgccgcctctcctcctcctcctcctcctcctacttctccacctccacctcgccaccctcacggtcacggtcatggtctccccgcgacgcctttgccgcggccacggagcgcgtccgtgccgggacgctcagcccggaggacgcacaccacctgttcgaccaattgctacggcaggacactccggtccacgagcgctccctgggcggcttccttgccgccctcgcccgtgcgccagactcagctgcctgcagagatggccccgccctcgccatcgccctcttcaaccgcgtatgccgagaagaagcaggccggccggtggtgccgcccacagtctacacctacgccatcctgatgaactgctgctgccgcgtgcgtcgtccggacctagggcttgccttatttggccgcctcctaaggacaggcctcaaacaaatgagatcgtcgccagcaccgtcctcaagtgcctctgctgcgcaaaacggacagatgaagcag

SEQ ID NO: 2845 - DNA, 816 bp, Triticum aestivum
  source 1..816: mol_type = genomic DNA
atgtcatgtgtatacctgaaaaactttcctgctgcacacgttcaacaccgccaccaaaacggcaggacaactgacccgcgatcaatttgccacttcccagaccaggcgcgtcctccccacccccgacggctcacgcgccgccgccgccgccgccgccgccgctcctcctcctccacatccacctacccgcaaccgccaggtgtccagcttccgcctccacctccgcaactccttctctcccaccccgcccatgtgaccatgttccgcatgcgcctccgcaactcctccaccatgcccatgtcccgcatcggcctcctcctccgccgcctctcctcctcctcctcctcctcctacttctccacctccacctcgccaccctcacggtcacggtcatggtctccccgcgacgcctttgccgcggccacggagcgcgtccgtgccgggacgctcagcccggaggacgcacaccacctgtttgaccaattgctacggcaggacactccggtccacgagcgctccctgggcggcttccttgccgccctcgcccgtgcgccagactcagctgcctgcagagatggccccgccctcgccatcgccctcttcaaccgcgtatgccgagaagaagcaggcaggccggtggtgccgcccacagtctacacctacgccatcctgatgaactgctgctgccgcgtgcgtcgtccggacctagggcttgccttatttggccgcctcctaaggacaggcctcaaacaaatgagatcgtcgccagcaccgtcctcaagtgcctctgctgcgcaaaacggacagatgaagcag

SEQ ID NO: 2846 - DNA, 816 bp, Triticum aestivum; identical to SEQ ID NO: 2842
  source 1..816: mol_type = genomic DNA

SEQ ID NO: 2847 - DNA, 564 bp, Triticum aestivum
  source 1..564: mol_type = genomic DNA
atgctccatgagatggtcgaatgcggaacaacagtgagcttgtccacatacaacataattcttgggggactttgtagaaatgattgcaccgacgaagcaatcgtcctatttcagaaattaggtgcaatgaatgtgaaattggatatcacaacactcaataccatgattgatgcaatgtacaaggttcgtagaagacaagaagctaaagatttgtttgctgcaatatcagccagtggcttggtacctaattctcctacttacggcacaatgatacaaagtctacaaaaagaaggattaatggaagaagctgacaatatcttctcatcaatggagaagagtggctgtgttctgagctctcgtcttttaaatgatatcatcagaacattactggaaaagggggagattctaaaggccggaaattatatgtctaaaattgatgggaagaacgcccaacttgaagcttcaactagttcgttgttgttgtctctgttttcaggggaaggggaatctcgggaacaaatacagttgctccctgtaaagtaccaattcttcgatgcagttagt

SEQ ID NO: 2848 - DNA, 564 bp, Triticum aestivum
  source 1..564: mol_type = genomic DNA
atgctccatgagatggtcgaatgtggaacaacagtgagcttgtccacatacaacataattcttggaggactttgtagaaatgattgcaccgacgaagcaatcgtcctatttcagaaattaggtgcaatgaatatgaaattggatatcacaacactcaataccatgattgatgcaatgtacaaggttcgtagaagacaagaagctaaagatttgtttgctgcaatatcagccagtggcttggtacctaattctcctacttacggcacaatgatacaaagtctactaaaagaaggattaatggaagaagctgacaatatcttctcgtcaatggagaagagtggctgtgttctgagctctcgtcttttaaatgatatcatcagaacattactggaaaagggagagattctaaaggccggaaattatatgtctaaaattgatgggaagaacgcccaacttgaagcttcaactagttcgttgttgttgtctctgttttcaggggaagggaaatatcgggaacaaatacagttgctccctgtaaagtaccaattcttcgatgcagttagt

SEQ ID NO: 2849 - DNA, 564 bp, Triticum aestivum; identical to SEQ ID NO: 2847
  source 1..564: mol_type = genomic DNA

SEQ ID NO: 2850 - DNA, 564 bp, Triticum aestivum; identical to SEQ ID NO: 2847
  source 1..564: mol_type = genomic DNA

SEQ ID NO: 2851 - DNA, 564 bp, Triticum aestivum; identical to SEQ ID NO: 2847
  source 1..564: mol_type = genomic DNA

SEQ ID NO: 2852 - DNA, 564 bp, Triticum aestivum; identical to SEQ ID NO: 2847
  source 1..564: mol_type = genomic DNA

SEQ ID NO: 2853 - DNA, 564 bp, Triticum aestivum; identical to SEQ ID NO: 2847
  source 1..564: mol_type = genomic DNA

SEQ ID NO: 2854 - DNA, 666 bp, Triticum aestivum
  source 1..666: mol_type = genomic DNA
atgtccgagctcggttgtgtgcctgatgccttctcttacaccattgttcttaagatcttatgtgatgctagcagcagccagtgggcgctcgacctgctccagactatggagaaaggaggaggtgtctgctcccctgacgtggtgtcatataccacggtcatccacaacctccttaaggaaggggaagtaagcaaggcatgcaatctataccatgaaatggtgcagcaaggggttgtgcctgatgtgaggacatatagctcgattattaatgcgctatgcaaggccgaagcaatggacaaggcagagttgttccttcgtcagatggttgataagggtgttcggccgaataacaagacatatactagcataatccatggatattccacgttgggccggtggaaagaagctggcaaaatgttcagagaaatgacaagccagggtatcataccagatgttgttacttggacctcattcatggcctccttctgcaagcatggaagaagcagagaagctgccaaaatttttgattacatgtcttccaggggacacaagcctaatgtcgtctcatattctattttgtttcatggatatggtatagaaggatgctttgctgatatgattaatctccttaattcaatggcaaacaacggtattgttcccaatcgc

SEQ ID NO: 2855 - DNA, 666 bp, Triticum aestivum
  source 1..666: mol_type = genomic DNA
atgtccgagctcggttgtgtgcctgatgccttctcttacaccattgttcttaagatcttatgtgatgctagcagcagccagtgggcgctcgacctgctccagactatggagaaaggaggaggtgtctgctcccctgacgtggtgtcatataccacggtcatccacaacctccttaaggaaggggaagtaagcaaggcatgcaatctataccatgaaatggtgcagcaaggggttgtgcctgatgtgaggacatatagctcgattattaatgcgctatgcaaggccgaagcaatggacaaggcagagttgttccttcgtcagatggttgataagggtgttcggccgaataacaagacatatactagcataatccatggatattccacgttgggccggtggaaagaagctggcaaaatgttcagagaaatgacaagccagggtatcataccagatgttgttacttggacctcattcatggcctccttctgcaagcatggaagaagcagagaagctgccaaaaattttgattacatgtcttccaggggacacaagcctaatgtcgtctcatattctattttgtttcatggatatggtatagaaggatgctttgctgatatgattaatctccttaattcaatggcaaacaacggtattgttcccaatcgc

SEQ ID NO: 2856 - DNA, 666 bp, Triticum aestivum; identical to SEQ ID NO: 2854
  source 1..666: mol_type = genomic DNA

SEQ ID NO: 2857 - DNA, 666 bp, Triticum aestivum
  source 1..666: mol_type = genomic DNA
atgtccgagctcggttgtgtgcctgatgccttctcttacaccattgttcttaagatcatatgtgatgcttgcagcagccagtgggcgctcgacctggtccagactatggagaaaggaggaggtgtctgctcccctgacgtggtgtcatataccacggtcatccacgacctccttaaggaaggggaagtaagcaaggcatgcaatctataccatgaaatggtgcagcaaggggttgtgcctgatgtgaggacatatagctcgattattaatgcgctatgcaaggccgaagcaatggacaaggcagagttgttcctttgtcagatggttgataatggtgttcggccgaataacaagacatatactagcataatccatggatattccacgttgggccggtggaaagaagctggcaaaatgttcagagaaatgacaagccagggtatcataccagatgttgttacttggacctcattcatggcctccttctgcaagcatggaagaagcagagaagctgccaaaatttttgattacatgtcttccaggggacacaagcctaatgtcgtctcatattctattctatttcatggatatggtacagaaggatgctttgctgatatgattaatctccttaattcaatggcaaacaacggtattgttcccaatcgc

SEQ ID NO: 2858 - DNA, 666 bp, Triticum aestivum; identical to SEQ ID NO: 2857
  source 1..666: mol_type = genomic DNA

SEQ ID NO: 2859 - DNA, 666 bp, Triticum aestivum; identical to SEQ ID NO: 2854
  source 1..666: mol_type = genomic DNA

SEQ ID NO: 2860 - DNA, 516 bp, Triticum aestivum
  source 1..516: mol_type = genomic DNA
atggactgctgctgccgtgcgcgtcgcccggagctagggcttgccttattcgtccgcgtcctcaggaagggcctaaagacaaaccagatcgtcgcgaacaccttcctcaagtgcctctgctatgcgaaaaggacggatgaggctgtgaacgtgctgcttcataggatgtccgagctcggctgtgtgccagatgccttctcatacaacattgttctgaagatcttctgcgacaatagcatgagccagcgagggctcgaacttctccagatgatggcgaaagaaggaggtggctgcttccctgatatggtggcatataacacggtcatccatggcctctttaaggagggtgaaataggcaaggcatgcaatctattccatgaaatggtgcagcaaggtgttgtgcctggtgtggtgacatatagctcgattattgacgcgctgtgcaaggccagagcaatggacaaggcagagctagtccttcggcagatggttgccaatggtgctcaacccaatcaa

SEQ ID NO: 2861 - DNA, 516 bp, Triticum aestivum; identical to SEQ ID NO: 2860
  source 1..516: mol_type = genomic DNA

SEQ ID NO: 2862 - DNA, 516 bp, Triticum aestivum; identical to SEQ ID NO: 2860
  source 1..516: mol_type = genomic DNA

SEQ ID NO: 2863 - DNA, 516 bp, Triticum aestivum; identical to SEQ ID NO: 2860
  source 1..516: mol_type = genomic DNA

SEQ ID NO: 2864 - DNA, 567 bp, Triticum aestivum
  source 1..567: mol_type = genomic DNA
atgagaagccaaggtgttatgccaaatgttgttacctgcaactcagtcatgacctaccattgcaagaatggaagagtcaaagaagctgcagaaatattttattccatggctgtgaacggccgaaaacctgatgtcatctcatactctattatgctccacgggcacgcgacagaaggatccattgttgaaatgattgatctctgtgagctgatggcaagagacggagttgtacccaaccgctctgttttcaacatactgattaaggcatatgctaagtatggcatgatggatgtggccatgcttttcttcgaagacatgttgaagaagggggtgaaccctaatgaagtcacttatttaaccgtgatatctgcattttgcaagatgggcaggatggatgatgcgatggaaaaattcaatgagatgattgatatgggagtaccacttgacacagaagtttacatgtgcatggttgagggttattttaatcatgatgattccatgaaagcggaggaatttattactaaaatgaagagcagggatatttttcataggccgcggaagggtaat

SEQ ID NO: 2865 - DNA, 567 bp, Triticum aestivum; identical to SEQ ID NO: 2864
  source 1..567: mol_type = genomic DNA

SEQ ID NO: 2866 - DNA, 567 bp, Triticum aestivum; identical to SEQ ID NO: 2864
  source 1..567: mol_type = genomic DNA

SEQ ID NO: 2867 - DNA, 567 bp, Triticum aestivum; identical to SEQ ID NO: 2864
  source 1..567: mol_type = genomic DNA

SEQ ID NO: 2868 - DNA, 567 bp, Triticum aestivum; identical to SEQ ID NO: 2864
  source 1..567: mol_type = genomic DNA

SEQ ID NO: 2869 - DNA, 567 bp, Triticum aestivum; identical to SEQ ID NO: 2864
  source 1..567: mol_type = genomic DNA

SEQ ID NO: 2870 - DNA, 759 bp, Triticum aestivum
  source 1..759: mol_type = genomic DNA
atgagccgccgcgtcgtccccgttggcaggcgcatcttggagcagaacatcaaggctcggtaccacgccagagacattggcaccgaggatgcactccacctgtttgacgaattgctcccgtatgctgggcgctcctccatccatgccatcaactgcctcctcaccgttgtcggccgtgattgccctgcgctcggcgcctccctcttcaaccgcgtcgcaaggtccaaggtggcacccagcagtatcacctatgccattctggtcgactgctgctgccgcgctggccgccaggaccttggacacactgccatgggacaggtcatcaagatggggtttcttgcagatgctatgatcactttcagccacctactcaaggccatctgtgcggagaacaagaccagctatgcaatggacatcctactccgaataatgcccatgtttaactgcgtaccggatgtcatctcctacaacattcttttcaagggtgactgcaacgagaagagaagccaagaggctctcgagctgattcaggtgatggttgagcatggaggtggctgccaacctactgtggtgtcctatagcaccgtaattgatggcttgttgaaagagggtgaggtgaacaaggcttacagcctattttgtcaaatgttacaaaggggaatttcaccggatgttgtgacctgtagttcaattatttctggcatgtgcaagcttcatgcgatggacaaggctgaggaggttcttcaacagatgcttgat

SEQ ID NO: 2871 - DNA, 759 bp, Triticum aestivum; identical to SEQ ID NO: 2870
  source 1..759: mol_type = genomic DNA

SEQ ID NO: 2872 - DNA, 759 bp, Triticum aestivum; identical to SEQ ID NO: 2870
  source 1..759: mol_type = genomic DNA

SEQ ID NO: 2873 - DNA, 627 bp, Triticum aestivum
  source 1..627: mol_type = genomic DNA
atggactgctgctgccgtgtgcgtcgcccgaagctagtgcttaccttattcagcctattcctgatgaaaggcctgaagacaaaccagatcattgtcaacaccttcctcaagtgcctctgctatgcgaaaaggacggacgaggctgtgaatgtgctgcttcataggatggctgagctcgtctgcgtgcctaatgccttctcatacaacattgttctgaagagcttctgcgactatagcatgagccaacgggcgctcgaactgctccagatgatcgcgaaagaaggaggtggctgcttccctgatgtggtggcatataacacggtcatccatggcctctttatggagggcgaaacaggcaaggcatgcaatctattccatgaaatggtgcagcaagatgttgcgcccagtgtggtgacatatatctcgattattgacgctttgtgcaaggccagagcaatggagaaggcagagctagtcctttggcagatggttgctaatggtgctcatcccgatacaatgacatatagttgcatgatcaatggatattccacatctgggcggttgaaagaggccactaaattgttaagagaaatgacaggccggggtcttataccagatattgttact

SEQ ID NO: 2874 - DNA, 777 bp, Triticum aestivum
  source 1..777: mol_type = genomic DNA
atggactgctgctgccgtgtgcgtcgcccgaagctagtgattaccttattcagcctcttcctgatgaaaggcctgaagacaaaccagatcattgtcaacaccttcctcaagtgcctctgctatgcgaaaaggacggacaaggctgtgaatgtgctgcttcataggatgtctgagctcggctgcgtgcctaatgccttctcatacaacattgttctgaagagctcctgcgactatagcatgagccaacgggcgctcgaactgctccagatgatcgcggaagaaggaggtggctgcttccctgatgtggtggcatataacacggtcatccatggcctctttatggagggcgaaacaggcaaggcatgcaatctattccatgaaatggtgcagcaagatgttgcgcccagtgtggtgacatatatctcgattattgacgctttgtgcaaggccagagcaatggagaagacagagctagtcctttggcagatggttgctaatggtgctcatcctgatacaatgacatatagttgcatgatcaatggatattccacatctgggcggttgaaagaggccactaaattgttaagagaaatgacaggccggggtcttataccagatattgttacttgcaactcgttcctggcctccctttgcaagcttggaagaagcaaagaagctgcagaattttttgaatccatgactgccaagggccacaaaactggatatcgtctcataccacattttgcttcatgggtatgctaccgaaggatgctttgc

SEQ ID NO: 2875 - DNA, 762 bp, Triticum aestivum
  source 1..762: mol_type = genomic DNA
atggactgctgctgccgtgtgcgtcgcccgaagctagtgcttaccttattcagcctcttcctgatgaaaggcctgaagacaaaccagatcattgtcaacaccttcctcaagtgcctctgctatgcgaaaaggacggacaaggctgtgaatgtgctgcttcataggatgtctgagctcggctgcgtgcctaatgccttctcatacaacattgttctgaagagcttctgcgactatagcatgagccaacgggcgctcgaactgctccagatgatcgcgaaagaaggaggtggctgcttccctgatgtggtggcatataacacggtcatccatggcctctttatggagggcgaaacaggcaaggcatgcaatctattccatgaaatggtgcagcaagatgttgcgcccagtgtggtgacatatatctcgattattgacgctttgtgcaaggccagagcaatggagaaggcagagctagtcctttggcagatggttgctaatggtgctcatcctgatacaatgacatatagttgcaagatcaatggatattccacatttgggcggttgaaagaggccactaaattgttaagagaaatgacaggccggggtcttataccagatattgttacttgcaactcgttcctggcctccctttgcaagcttggaagaagcaaagaagctgcagaattttttgaatccatgactgccaagggccacaaaactggatatcgtctcataccacattttgcttcatgggtatgctac

SEQ ID NO: 2876 - DNA, 762 bp, Triticum aestivum
  source 1..762: mol_type = genomic DNA
atggactgctgctgccgtgtgcgtcgcccgaagctagtgcttaccttattcagcctcttcctgatgaaaggcctgaagacaaaccagatcattgtcaacaccttcctcaagtgcctctgctatgcgaaaaggacggacaaggctgtgaatgtgctgcttcataggatgtctgagctcggctgcgtgcctaatgccttctcatacaacattgttctgaagagcttctgcgactatagcatgagccaacgggcgctcgaactgctccagatgatcgcgaaagaaggaggtggctgcttccctgatgtggtggcatataacacggtcatccatggcctctttatggagggcgaaacaggcaaggcatgcaatctattccatgaaatggtgcagcaagatgttgcgcccagtgtggtgacatatatctcgattattgacgctttgtgcaaggccagagcaatggagaaggcagagctagtcctttggcagatggttgctaatggtgctcatcctgatacaatgacatatagttgcatgatcaatggatattccacatctgggcggttgaaagaggccactaaattgttaagagaaatgacaggccggggtcttataccagatattgttacttgcaactcgttcctggcctccctttgcaagcttggaagaagcaaagaagctgcagaattttttgaatccatgactgccaagggccacaaaactggatatcgtctcataccacattttgcttcatgggtatgctac

SEQ ID NO: 2877 - DNA, 777 bp, Triticum aestivum; identical to SEQ ID NO: 2874
  source 1..777: mol_type = genomic DNA

SEQ ID NO: 2878 - DNA, 762 bp, Triticum aestivum; identical to SEQ ID NO: 2876
  source 1..762: mol_type = genomic DNA

SEQ ID NO: 2879 - DNA, 537 bp, Triticum aestivum
  source 1..537: mol_type = genomic DNA
atggactgctgctgccgcgcgcgtcgccctgacctggggcttgccttcttcggccgcctcctcaggacgggcctgaggacagacggcatcgacgcatacgccctcatcaggtgcttttgcctcgcaaaacggacagacaaggctgtcagcgtgctgctccataggatgcctgaactcggctgtgcgcctgatgccttgtcatactccgtcgttctgaaggtcttgtgtgacgatggcaggagccagcgagcgcttgacctgccccagatgatgtcgaaagaaggaggtggctgcgcccccaacgtggtggcatatagcacggtcatccatggcttctgtaaggaaggcgaagtaagcaaggcatgcgatctgttcaatgaaatggagcatcaaggagttaaacctaatgtggtgacatatacctcgataattgatgcgctgtgcaaggccagagcaatggacaaggcagagtcgttccttcggcagatggtcgataatgatgttcgacccaacaacgtggcatataagtgtatgatc

SEQ ID NO: 2880 - DNA, 537 bp, Triticum aestivum; identical to SEQ ID NO: 2879
  source 1..537: mol_type = genomic DNA

SEQ ID NO: 2881 - DNA, 537 bp, Triticum aestivum; identical to SEQ ID NO: 2879
  source 1..537: mol_type = genomic DNA

SEQ ID NO: 2882 - DNA, 537 bp, Triticum aestivum; identical to SEQ ID NO: 2879
  source 1..537: mol_type = genomic DNA

SEQ ID NO: 2883 - DNA, 537 bp, Triticum aestivum; identical to SEQ ID NO: 2879
  source 1..537: mol_type = genomic DNA

SEQ ID NO: 2884 - DNA, 537 bp, Triticum aestivum; identical to SEQ ID NO: 2879
  source 1..537: mol_type = genomic DNA

SEQ ID NO: 2885 - DNA, 537 bp, Triticum aestivum; identical to SEQ ID NO: 2879
  source 1..537: mol_type = genomic DNA

SEQ ID NO: 2886 - DNA, 729 bp, Triticum aestivum
  source 1..729: mol_type = genomic DNA
atgtcaagcctccgcgtcctccgccgcagctccacctccacctccacctccacctcgccgccctcgcgctcctggtctcccaccgcagcctttgccgcggccacagagcgtgtccgcgccgggacgctcagccaagatgatgcacaccacctgttcgacgaattgctgcggcaggtcaccccggtccccgagcgccccctcaacggcttcctcgccgccctcgcacgtgctacgtcctctgccgcctgcatcagagatggtcccgccctcgacgtcgccctcttcaaccgcgtgtgccgagaacaagccggcccgcgggtggcgcctctcacagtccacacgtacaacatcctcatggactgctgctgccgcgcgtctcgcccggacctaggtcttgccttcttcgctcgcctcctcaggacaggcctgaagacagatgagatcaccgccaacaccttcctcaagtgcctctgctacgcaaaacggacggatgaggctgtgaacgtgctgcttcataggatgtccgagcttggctgtgtgcctaatgccttctcatactccattgttctgaagagcttatgcgacaatagcatgagtcagcgggcgctcgacctgctccagatgatggcgaaagaaggaggtgcctgctcccccaacgtggtggcatatagcacggtcatccatggcttcttaggaaggcgaaacaggcaaggcatgcaatctgttcca

SEQ ID NO: 2887 - DNA, 729 bp, Triticum aestivum; identical to SEQ ID NO: 2886
  source 1..729: mol_type = genomic DNA

SEQ ID NO: 2888 - DNA, 729 bp, Triticum aestivum; identical to SEQ ID NO: 2886
  source 1..729: mol_type = genomic DNA

SEQ ID NO: 2889 - DNA, 729 bp, Triticum aestivum
  source 1..729: mol_type = genomic DNA
atgtcaagcctccgcgtcctccgccgcagctccgcctccacctccacctccacctcgccgccctcgcgctcctggtctcccaccgcagcctttgccgcggccacagagcgtgtccgcgccgggacgctcagccaagatgatgcacaccacctgttcgacgaattgctgcggcaggtcaccccggtccccgagcgccccctcaacggcttcctcgccgccctcgcacgtgctacgtcctctgccgcctgcatcagagatggtcccgccctcgacgtcgccctcttcaaccgcgtgtgccgagaacaagccggcccgcgggtggcgcctctcacagtccacacgtacaacatcctcatggactgctgctgccgcgcgtctcgcccggacctaggtcttgccttcttcgctcgcctcctcaggacaggcctgaagacagatgagatcaccgccaacaccttcctcaagtgcctctgctacgcaaaacggacggatgaggctgtgaacgtgctgcttcataggatgtccgagcttggctgtgtgcctaatgccttctcatactccattgttctgaagagcttatgcgacaatagcatgagtcagcgggcgctcgacctgctccagatgatggcgaaagaaggaggtgcctgctcccccaacgtggtggcatatagcacggtcatccatggcttcttaggaaggcgaaacaggcaaggcatgcaatctgttcca

SEQ ID NO: 2890 - DNA, 729 bp, Triticum aestivum; identical to SEQ ID NO: 2889
  source 1..729: mol_type = genomic DNA

SEQ ID NO: 2891 - DNA, 729 bp, Triticum aestivum; identical to SEQ ID NO: 2886
  source 1..729: mol_type = genomic DNA

SEQ ID NO: 2892 - DNA, 399 bp, Triticum aestivum
  source 1..399: mol_type = genomic DNA
atggactgctgctgccgcgcgcgtcgcccggacctagggcttgccttattcggccgcttcctcaggacaggcctgaggacaaacgagatcgtcgccaccaccttcctcaagtgcctctgctgcgcaaaacagatagatgaggctgtgaaagtactgcttcacaggatgcccaagctgggctgtgtgcctaatgccatctcatactccatagttttgaaaagcttgtgtgaaaatagcatgagtcagcaggcactcgacctgctccagatggtagggaaagaaggaggctgccttcgtgatgtgatggcatataacacaatcatccatggcttctttaaggagggcggaatagacaaggcaaggggttatgccgactgtggtgacatacaacacagtaat

SEQ ID NO: 2893 - DNA, 684 bp, Triticum aestivum
  source 1..684: mol_type = genomic DNA
atgcctcgcctctgctccaccacgcccatggcccgcctccgccgccggcgccgctactcctcctccacctcgtcgccttcacgccgttgggacccccgagccgcctttgccgcggccacggagcgcatccgcgccgggacgctcaggcctgaagacgcacaccacctgttcgacgaattgctactgcaggccaaccccgtccccgagcgctccctcagcgacttccttgccgcgctcgcccgtgctccgtcctccgctgctctcagagatggaccctcccttgctctcggcctcttcaacctcgtctgccgagaagaagcagggccgcaggtggcgccacccacaacctgcacctacaacatactcatggacagctgctgccgtgcacgccgcccggacctaggccttgccttcttcggccgcttcctgagtacgggcctcaaggcaaaccagatcgtcgccaccaccctcctcaagtgcctctgccacgcaagacggacagatgaggcaatcaacgtgctgctccataggatgtctgaattcggatgtgtgcctaatgtcatctcatactctatagtacttaagagcttatgtgatgatagcaggagccagcaagcgctcgacttgctccagatggtgaggaaaggaggtgcggctccctcagtgtggtggcatatagcacag

SEQ ID NO: 2894 - DNA, 684 bp, Triticum aestivum; identical to SEQ ID NO: 2893
  source 1..684: mol_type = genomic DNA

SEQ ID NO: 2895 - DNA, 684 bp, Triticum aestivum; identical to SEQ ID NO: 2893
  source 1..684: mol_type = genomic DNA

SEQ ID NO: 2896 - DNA, 684 bp, Triticum aestivum; identical to SEQ ID NO: 2893
  source 1..684: mol_type = genomic DNA

SEQ ID NO: 2897 - DNA, 684 bp, Triticum aestivum; identical to SEQ ID NO: 2893
  source 1..684: mol_type = genomic DNA

SEQ ID NO: 2898 - DNA, 684 bp, Triticum aestivum; identical to SEQ ID NO: 2893
  source 1..684: mol_type = genomic DNA

SEQ ID NO: 2899 - DNA, 738 bp, Triticum aestivum
  source 1..738: mol_type = genomic DNA
atgattgataaaggtgttaagccagacaatttgacatacactataatcattgatggcctatgcaaagctcaatcggttgatagggctgagggtgtctttcagcagatgattgataaaggtgttaagccaaacaatgggacatataattgtctcatccatggatacctatcaacaggacagtgggaagaggtggttcaaaggatcaaagaaatgtctgcacatgatcttgagccagatgtttttacttatggtttgcttctrgactatctatgcragaatggaaaktgcartgaagctagaagtttwtttgattctatgattaggaagggcataaaacctrrtgtwactatctaykscattatgcttcatggatatggtaccaaaggagctctttctgaaatgcatgatctcctgaatttgatggtagcaaatggtatttcccctaatcatcgcatcttcaacaccatgatctatgcatatgmtaaagaggcaatgatagatgaggcgatgcatatatttatcaaaatgaaacagcaaggtttaagtccagatgccgtcagttatgcagaattaatagatgcactttgcaagttgggcagagtggatgatgccgttctccaattcaagcagatgatcaatgaaggagtgactcctgacaatgtagtttttaactcccttgtttatggactttgcactgttgacaaatgggagaaggttgagaattatttttcgaaatgc

SEQ ID NO: 2900 - DNA, 759 bp, Triticum aestivum
  source 1..759: mol_type = genomic DNA
atgagccgccgctttgtccccgtcgacagacgcatcttggagcggaacatcaaggctcggtaccacgctggagacattggcaccgaggatgcactcaacctgttcgacgaattgatccaggttgctgggccttcctcagtcctcgccatcaactgcctcctcaccgttgtcggccgtgattgccccgcgctcggcgtctccctcttcaaccgtgttgcaagagccaaggtgcctccccacaatatcacctatggcattctagtcgactgctgctgccgtgctggccgcttggaccttggacatgctggcatggggcacgtcattaagttgggatttgcagcagaagccatcgtcaatttcagccacctactcaaggccatctgcgccgaggagaagaccagctatgcaatggaaatcgtactccggataatgcctgaatttaactgcatcccgaacattttctcatacagcattcttttgaagggtctttgcaacgagaagaggagccaagaggctctcgagctgattcacatgatgattgaccatggaggtagctgccaacctaatgtggtgtcctatagcaccgtacttgatggcttgttgaaagatggtgaggtgggcaaggcctacagcctattttgtgtcatgctacagaggggaatttcgccgaatgttgtgacctgcaattcaatcatctctggcatgtgcaaagttcatgcgatggacaaggcagaggaggttcttcaacagatgactgat

SEQ ID NO: 2901 - DNA, 759 bp, Triticum aestivum; identical to SEQ ID NO: 2900
  source 1..759: mol_type = genomic DNA

SEQ ID NO: 2902 - DNA, 759 bp, Triticum aestivum; identical to SEQ ID NO: 2900
  source 1..759: mol_type = genomic DNA

SEQ ID NO: 2903 - DNA, 615 bp, Triticum aestivum
  source 1..615: mol_type = genomic DNA
atgagccgccgctttgtccccgtcgacagacgcatcttggagcggaacatcaaggctcggtaccacgctggagacattggcaccgaggatgcactcaacctgttcgacgaattgatccaggttgctgggccttcctcagtcctcgccatcaactgcctcctcaccgttgtcggccgtgattgccccgcgctcggcgtctccctcttcaaccgtgttgcaagagccaaggtgcctccccacaatatcacctatggcattctagtcgactgctgctgccgtgctggccgcttggaccttggacatgctggcatggggcacgtcattaagttgggatttgcagcagaagccatcgtcaatttcagccacctactcaaggccatatgtgcggagaagaagaccagctatgcaatggacattgtactccggataatgcctgaatttaactgcatcccgaacattttctcatacagcattcttttgaagggtctttgcaacgagaagaggagccaagaggctctcgagctgattcacatgatgattgaccatggaggtagctgccaacctaatgtggtgtcctatagcaccgtacttgatggcttgttgaaagagggtgag

SEQ ID NO: 2904 - DNA, 615 bp, Triticum aestivum
  source 1..615: mol_type = genomic DNA
atgagccgccgctttgtccccgtcgacagacgcatcttggagcggaacatcaaggctcggtaccacgctggagacattggcaccgaggatgcactcaacctgttcgacgaattgatccaggttgctgggccttcctcagtcctcgccatcaactgcctcctcaccgttgtcggccgtgattgccccgcgctcggcgtctccctcttcaaccgtgttgcaagagccaaggtgcctccccacaatatcacctatggcattctagtcgactgctgctgctgtgctggccgcttggaccttggacatgctggcatggggcacgtcattaagttgggatttgcagcagaagccatcgtcaatttcagccacctactcaaggccatatgtgcggagaagaagaccagctatgcaatggacattgtactccggataatgcctgaatttaactgcatcccgaacattttctcatacagcattcttttgaagggtctttgcaacgagaagaggagccaagaggctctcgagctgattcacatgatgattgaccatggaggtagctgccaacctaatgtggtgtcctatagcaccgtacttgatggcttgttgaaagagggtgag

SEQ ID NO: 2905 - DNA, 723 bp, Triticum aestivum
  source 1..723: mol_type = genomic DNA
atgtcaagcctccgcctcctccgccgcagttccacctccacctccacctcgccgccctcgcgctcctggtctcccaccgcagcctttgccgcggccacagagcgtgtccgcgccgggacgcttagccaagatgacgcacaccacctgttcgacgaattgctgcggcaggccaccccggtccccgagcgccccctcaacggcttcctcgccgccctcgcacgtgctacgtcctctgccgcctgcatcacagatggccctgccctcgccgttgccctcttcaaccgcgtgtgtcgagagcaatccggcccgcgggtggtgcctctcacagtttgcacctacaacatcctcatggactgctgctgccgcacgtctcgcacggacctaggtcttgccttcttcgctcgactcctcaggacaggcctgaagacagatgagatcaccgccaacaccttcctcaagtgcctctgctacgcaaaacggacggatgaggctgtgaacgtgctgcttcataggatgtccgagctcggctgtgtgcctaatgccttctcatactccattgttctgaagagcttatgcaacaataacatgagtcagcgggcgctcgacctgctccagatgatggcgaaagatagaggtagctgtttccctgatgtggtggcatatagcagtcatccatggctttttcaaggaaggcgaaacaagcaaggcatgcaatctgttcca

SEQ ID NO: 2906 - DNA, 792 bp, Triticum aestivum
  source 1..792: mol_type = genomic DNA
atgtcacgccttcaggtccgctctttctccagctccgtttcctcacgcgccaacgagctgctgaacgaactccacgaccatcttggcttcgggacactcaggccagagctcgcgcaccaactgttcgacgaaatgctgcaccaacctgtcacagtatcagtacgtgcactcgacgacttatttgctgccctcgcgcgtgtgccggcctcacctgcctgcaccgatggccctgccctcgccattgatctcttcaaccgcatggcccgagcaggccgtcgccaggtgctagcaccctccatttacacctacaacatactaattgagtgttgccaccgagcatgccgcccagacctagggcctgccttcttcggccgcctcctcaagacaggcatcaagacggatgtcgttacctacagcagcttactcaagtgcctctgtgacatgaagcgaacagaggaggctttgggcgtgctgctccacaggatgcccgacgacctgcctaatgtcatctcctactcagtaattctcaagagtttctgcgacagtggtaggagccagcttgcacttgacttgctccggatgatggccgaaaaaggatctgaccactctcccagcatggtgttatacagcttggtaatcgatggcttcttgaaggagggtgaaataagcaaagcatgcaatttgctccctgaaatgatgcagcagggggttgtgcctgatgtggtgacgtataactcctttatcgatgcgctatgcaaagcaagagcaatggacaaggcagaggtagttctt

SEQ ID NO: 2907 - DNA, 792 bp, Triticum aestivum
  source 1..792: mol_type = genomic DNA
atgtcacgccttcaggtccgctctttctccagctccgtttcctcacgcgccaacgagctgctgaacgaactccacggccatcttggcttcgggacactcaggccagagctcgcgcaccaactgttcgacgaaatgctgcaccaacctatcacagtatcagtacgtgcactcgacgacttatttgctgccctcgcgcgtgcgccggcctcacctgcctgcaccgatggccctgccctcgccattgatctcttcaaccgcatggcccgagcaggccgtcgccaggtgctagcaccctccatttacacctacaacatactaattgagtgttgccaccgagcatgccgcccagacctagggcctgccttcttcggccgcctcctcaagacaggcatcaagacggatgtcgttacctacatcagcttactcaagtgcctctgtgacatgaagcgaacggaggaggctttgggcgtgctgctccacaggatgcccgacgacctgcctaatgtcatctcctactcagtaattctcaagagtttctgcgacagtggtaggagccagcttgcacttgacttgctccggatgatggccgaaaaaggatctgaccactctcccagcgtggtgttatacagcttggtaatcgatggcttcttgaaggagggtgaaataagcaaagcatgcaatttgctccctgaaatgatgcagcagggggttgtgcccgatgtggtgacgtataactcctttatcgatacgctatgcaaagcaagagaaatggacaaggcagaggtagttctt

SEQ ID NO: 2908 - DNA, 792 bp, Triticum aestivum
  source 1..792: mol_type = genomic DNA
atgtcacgccttcaggtccgctctttctccagctccgtttcctcacgcgccaacgagctgctgaacaaactccacgaccatcttggcttcgggacactcaggccagagctcgcgcaccaactgttcgacgaaatgctgcaccaacctgtcacagtatcagtacgtgcactcgacgacttatttgctgccctcgcgcgtgtgccggcctcacctgcctgcaccgatggccctgccctcgccattgatctcttcaaccgcatggcccgagcaggccgtcgccaggtgctagcaccctccatttacacctacaacatactaattgagtgttgccaccgagcatgccgcccagacctagggcctgccttcttcggccgcctcctcaagacaggcatcaagacggatgtcgttacctacagcagcttactcaagtgcctctgtgacatgaagcgaacagaggaggctttgggcgtgctgctccacaggatgcccgacgacctgcctaatgtcatctcctactcagtaattctcaagagtttctgcgacagtggtaggagccagcttgcacttgacttgctccggatgatggccgaaaaaggatctgaccactctcccagcatggtgttatacagcttggtaatcgatggcttcttgaaggagggtgaaataagcaaagcatgcaatttgctccctgaaatgatgcagcagggggttgtgcctgatgtggtgacgtataactcctttatcgatgcgctatgcaaagcaagagcaatggacaaggcagaggtagttctt

SEQ ID NO: 2909 - DNA, 792 bp, Triticum aestivum
  source 1..792: mol_type = genomic DNA
atgtcacgccttcaggtctgctctttctccagctccgtttcctcacgcgccaacgagctgctgaacgaactccacgaccatcttggcttcgggacactcaggccagagctcgcgcaccaactgttcgacgaaatgctgcaccaacctgtcacagtatcagtatgtgcactcgatgacttatttgctgccctcgcgcgtgtgccggcctcacctgcctgcaccgatggccatgccctcgccattgatctcttcaaccgcatggcccgagcaggccgtcgccaggtgctagcaccctccatttacacctacaacatactaattgagtgttgccaccgagcatgccgcccagacctagggcctgccttcttcggccgcctcctcaagacaggcatcaagacggatgtcgttacctacagcagcttactcaagtgcctctgtgacatgaagcgaacggaggaggctttgggcgtgctgctccacaggatgcccgacgacctgcctaatgtcatctcctactcagtaattctcaagagtttctgcgacagtggtaggagccagcttgcacttgacttgctccggatgatggccgaaaaaggatctgaccactctcccagcgtggtgttatacagcttggtaatcgatggcttcttgaaggagggtgaaataagcaaagcatgcaatttgctccctgaaatgatgcagcagggggttgtgcccgatgtggtgacgtataactcctttatcgatgcgctatgcaaagcaagagcaatggacaaggcagaggtagttctt

SEQ ID NO: 2910 - DNA, 792 bp, Triticum aestivum; identical to SEQ ID NO: 2908
  source 1..792: mol_type = genomic DNA

SEQ ID NO: 2911 - DNA, 792 bp, Triticum aestivum; identical to SEQ ID NO: 2906
  source 1..792: mol_type = genomic DNA

SEQ ID NO: 2912 - DNA, 792 bp, Triticum aestivum; identical to SEQ ID NO: 2908
  source 1..792: mol_type = genomic DNA

SEQ ID NO: 2913 - DNA, 531 bp, Triticum aestivum
  source 1..531: mol_type = genomic DNA
atggcgcagcagggcgttaagcctaatgtggtgacatataactcagttatcgatgcgctgtgcaaggccaaagccatggacaaggcagaggtggtccttcgtcaaatgattgatcatagtgttggacctaatagcgtgacgtatagtagcctcatccatggatattcctcttcaggccactggaaggaggcagttagggtattcaaagagatgacaagtcggagggttacagcagatgtgcatacttacaacatgtttatgacctttctttgcaagaatggaaaaagcaaagacgctgcagaaatttttaattcaatggccacgaagggcctaaaacctacgaccgtttcatatgctattctccttcatgggtatgccaccgaaggatgcttagttgatatgactaatttcttcaattcaatggaaagagactgtattctaccagactgttgtatcttcagcatactgattaatgcatatgctaaatctgggaagcttgataaggcaatgcttttacacacggcgatttgg

SEQ ID NO: 2914 - DNA, 645 bp, Triticum aestivum
  source 1..645: mol_type = genomic DNA
atgtcccacgtccgcctccacctccaccgccggctcctctcatccacctcgccgccctcacgttcctggtctccccgcgacgcctttgccgtgaccacagagcggctgcgcgccgggacgctctgtcgagacgatgcacacaacctgttcgacgaattgtttcggcaggcaatcccggtccccgaccgctccctgaacggcttccttgccgccctcgcccgtgctacgtcctctggcgcctgcatcagagatggccccgccctcttcaaccgcgtgtgccgagaacaagccggctcgcaggtggcgcctctcacagtccacacctacaacatcctcatggactgctgctgccgtgcgtgtcgcccagatctagggcttgccttgttcgggtgtatcctcaggacgggcttgaagatagaacaaatcaccgccaacaccctcctcaagtgcctctgctatgcgaaacggacagaagaggctgtgtacgtgctgcttcataggatgtctgagctcggatgtgtgcctgatgccttctcatgctccattgttctgaagagcttatgcgacaacagcatgagtcagcggggccttgacctgctccagatgatggcgaaaggaggtggctgctccctcaatgtgggcata

SEQ ID NO: 2915 - DNA, 645 bp, Triticum aestivum
  source 1..645: mol_type = genomic DNA
atgtcccacgtccgcctccacctccaccgccggctcctctcatccacctcgccgccctcacgttcctggtctccccgcgacgcctttgccgcgaccacagagcggctgcgcgccgggacgctctgtcgagacgatgcacacaacctgttcgacgaattgtttcggcaggcaatcccggtccccgaccgctccctgaacggcttccttgccgccctcgcccgtgctacgtcctctggcgcctgcatcagagatggccccgccctcttcaaccgcgtgtgccgagaacaagccggctcgcaggtggcgcctctcacagtccacacctacaacatcctcatggactgctgctgccgtgcgcgtcgcccagatctagggcttgccttgttcgggtgtatcctcaggacgggcttgaagatagaacaaatcaccgccaacaccctcctcaagtgcctctgctatgcgaaacggacagaagaggctgtgtacgtgctgcttcataggatgtctgagctcggatgtgtgcctgatgccttctcatgctccattgttctgaagagcttatgcgacaacagcatgagtcagcggggccttgacctgctccagatgatggcgaaaggaggtggctgctccctcaatgtgggcata

SEQ ID NO: 2916 - DNA, 645 bp, Triticum aestivum; identical to SEQ ID NO: 2915
  source 1..645: mol_type = genomic DNA

SEQ ID NO: 2917 - DNA, 645 bp, Triticum aestivum; identical to SEQ ID NO: 2915
  source 1..645: mol_type = genomic DNA

SEQ ID NO: 2918 - DNA, 645 bp, Triticum aestivum; identical to SEQ ID NO: 2915
  source 1..645: mol_type = genomic DNA

SEQ ID NO: 2919 - DNA, 645 bp, Triticum aestivum
  source 1..645: mol_type = genomic DNA
atgtcccacgtccgcctccacctccaccgccggctcctctcatccacctcgccgccctcacgttcctggtctccccgcgacgcctttgccgcgaccacagagcggctgcgcgccgggacgctctgtcgagacgatgcacacaacctgttcgacgaattgtttcggcaggcaatcccggtccccgaccgctccctgaacggcttccttgccgccctcgcccgtgctacgtcctctggcgcctgcatcagagatggccccgccctcttcaaccgcgtgtgccgagaacaagccggctcgcaggtggcgcctctcacagtccacacctacaacatcctcatggactgctgctgccgtgcgcgtcgcccagatctagggcttgccttgttcgggtgtatcctcaggacgggcttgaagatagaacaaatcaccgccaacaccctcctcaagtgcctctgctatgcgaaacggacagaagaggctgtgtacgtgctgcttcataggatgtctgagctcggatgtgtgcctgatgccttctcatgctccattgttctgaagagcttatgcgacaacggcatgagtcagcggggccttgacctgctccagatgatggcgaaaggaggtggctgctccctcaatgtgggcata

SEQ ID NO: 2920 - DNA, 747 bp, Triticum aestivum
  source 1..747: mol_type = genomic DNA
atgccacgcgtgcgacccggctcgtcctccagcaccgtctcctcacgcgccaaccagctgctaaacaaactcaaggatcatctggactctgggacgctccagccggagcgcgcacaccaactgttcgacaaattgctgcgccaaaccgttccggtatcagcgtccgcactcaatggcttatttgccgccctcgcgcgtgcgctgccctccgctgcctgcaccgacggccctgctctagccattgctctcttcaaccgcatggctcgagagggccgccgggtgatagcacccaacatttacacctacagcatactaattgactgctgctgccgctcgcgccgccctgacctaggtcccgccttcttcgggttcctcctcaagacaggcatcaaggcggacatcatcaccttcaccagcctattcaagtgcctctgtcacatgaagcggatagacgaggctgtgggagtgctgcttcacaggatgcccggcgatatgcctgatgccatctcctactcaataattctcaagagcttctgcaatgaggggaggagccaacgtgcacttgacctgctccggatgatggccaaaaagggagctaatcactcccccgaagcatgcaccatagtaatctgtggcttaattaaggagggtgaactaagcaaagcatgctctctattccatgaaatgatgcagcagggggtcgtgcctagtgtggtagcatatagctccattatcgatgggttgtgc

SEQ ID NO: 2921 - DNA, 672 bp, Triticum aestivum
  source 1..672: mol_type = genomic DNA
atggaaaaagctttgagagtacttgatgacatggcatccgctggcattgagcctaatgttgttacatatggtacacttgttgacggctactgtagaagtggaaggattgatgatgggttgatgctattcagagaaatgttgcataagagagttgaacctacaactgttacctataacatcatactgaatgggttatttcatgctgggagaacggttgctgcaaagatgttccatgagatgatcaaaagtggaataacagtgagcatttccacatacatgataatccatggaggactttgcaggaatagtcatgctgacgaagcgatcaccctgttccagaaattaggagcaatggatgtgaagttggatgttacaatactcaataccatgatcaatgcaatgttcaaggttcagagaagagaagaagctaacgatttgtttgctgcaatatctgccagtggattggtacctaatgcttctacttatggcaaaaatatacaaaatcttctagaagaaggatcattggaagaagctgacgatatgttttcatcaatggagaagagtggttgtgctcccagttcttgtcttttaaattttatcatcagaacgttattgaaaaagggggagatagtaaaggctggaaattatctctactcatataaaaagcacact

SEQ ID NO: 2922 - DNA, 672 bp, Triticum aestivum; identical to SEQ ID NO: 2921
  source 1..672: mol_type = genomic DNA

SEQ ID NO: 2923 - DNA, 672 bp, Triticum aestivum; identical to SEQ ID NO: 2921
  source 1..672: mol_type = genomic DNA

SEQ ID NO: 2924 - DNA, 672 bp, Triticum aestivum; identical to SEQ ID NO: 2921
  source 1..672: mol_type = genomic DNA

SEQ ID NO: 2925 - DNA, 747 bp, Triticum aestivum
  source 1..747: mol_type = genomic DNA
atgtcacgccgctataccatcacactgatctcccgcctccgagtcccccgccgctgctcctcctccacctccatctcgccgccctcacgctcctggtctccccgcgacgcctttgccgcggccacagagcgcgtgcgcgccggcacgctcagcccggaagatgcacacaacctgttcgatgaattgctgcggcagggcactccggtccccgagcgctccctgaacggcttccttgccgccctcgcccgtgctacgtcctccactgcctgcatcaaagatggccccgccctcgcccttgctctcttcaaccgtgtgtgcagagaagaagccagcccgcaggttgcagtgcccaccgtttgcacctacagcgtcctcatggactgctgctgccgcgcgcgtcgcccagacctagggcttgccttattcggctgcatcctcaggaagggcttgaagatagaccaaatcaccgccaacaccctcctcaagtgcctctgctatgcaaaacagacagaagaggctgtgtacgtgctgcttcataggatgtcggagctcagctgtgtgcctgatgccttcgcatacaacatagttcttaagagcttatgtaaaggtagcaggagccagcgggcgcacgacctgctccggacgatggcaaaagatagaggtggctgcttccctgatgtggtgacatataccacggtcatccatggctttttcaaggagggcgaaacaggcatgcaatctattcca

SEQ ID NO: 2926 - DNA, 666 bp, Triticum aestivum
  source 1..666: mol_type = genomic DNA
atgttgtgcaagggacttaaaccaacaacttttaattacaacgtcatactggatggattatttctggctggacaaactgttgctgcaaaagagaagtttcatgagatggttgaatctggagtaactgtgtgcattgatacatactctatagttcttggtggactttgtagaaatagctgcagtagcgaagcgatcaccctgttccagaaattaagcgcaatgaatgtgaaatttgatattacaattgtcaatatcattattggtgccttctacagggtcgagagaaaccaagaggctaaggatttgtttgctgctattccagccaatggcttggttcctaatgttgttacctacaccataatgatgacaaatcttataaaagagggttcagtggaagaagctgacaatcttttcttatcgatggagaagagcggctgtactgccaactcttgcctgttaaatcatatcatcagaaggttactggaaaaaggagagatagtcaaggctggaaattatatgtctaaagttgatgcaaagagctactcacttgaagctaaaactgtttcacagctgatctctctgttttcaaggaaagggaaatatagagaacacatcaaattgctccctacaaagtatcagtttctggaagaagcagccacagttgaa

SEQ ID NO: 2927 - DNA, 534 bp, Triticum aestivum
  source 1..534: mol_type = genomic DNA
atgccccatctccgcctccgccgcttctccaccgcgccgatgttccacctcctccactgcagctcctcctccacctccacctcgccgccctcgcgttcctggtctccccatgccgcctttgccgccgccacagagcgtgtccgtgccgggacgctcagcccagaagacgtgcaccacctgttcgacgaattgctacggcaggccaccccggtccccaggcgctccctcaatggcttcctttccaccctcgcccgtgcgcccgcctcggccgcctgcattagagccagccagcaggtggcacctttgacagtccacacctacggcatcctcatgggctgcttctgcggtgcgcgtcgcccggacctagggcttgccttattcggccgcttcctcaggacaggcctgaagacaaatgagatcatcgccaccaccttcctcaagtgcctctgctccgccaaacgtacagatgagtgtcggtgtcaaaaccggcggatctctggtagggggtcccgaactgtgcgtctaggcggatgg

SEQ ID NO: 2928 - DNA, 594 bp, Triticum aestivum
  source 1..594: mol_type = genomic DNA
atgcactcaaatgaggcattggatctgctgctccaccggatgcccgaactggactgtgcgcctgatgtcttctcgttcaacatagtaatcaacggctgctttaragaagrtgaagtagacaaagcrtgcaatctcttccatgagatgccccaactgggagttcaacctgatgtggtgacctacacctcaatcatggacgcactaagcaagtccggagcaatggacaaggcagaagtgctccttcggcaaatggttgatcaaggaattgaacccaatatcaggacatatagctgtctgatccatggatattctacttttggtcagtggaaggaggcacttagggtattcaaagaaatggcaagtcttggtgttcgaccaaattctgtcacgttgaactcatttattgattccctttgcaagcatagaaagacaaagaaagctagagatatttttgactccatggccgcaaagggccacaaacctgatattttctcctactctactatgcttaattggtatgcgaaagaaggatgcttcgatgatatgactgatctcttcaattcgatggtacggaatggtatcgtacggaatgga

SEQ ID NO: 2929 - DNA, 459 bp, Triticum aestivum
  source 1..459: mol_type = genomic DNA
atgcgccaacgagctgctgaacgaactccactccacggccatctgggcttcgggacactcaggccagatctcgcgcaccaactgttcgacgaaatgctgcgccaaccagtcccagtatcagtacgtgcactcaacggcttatttgctgcccttgcgcgtgcgccgccctccaccatctgcaccgatgcccctgccctcgccattgatctcttcaaccgcatggcccaagcaggccgtcgccaggtgccagcacccaccattatcacctacaacatactgattggctgctgccatcgagcatgccgcccggacctagggcctgccttcttcggtcgcctcctcaagacaggcatcaagacgaatgtcattacctacaacagcttactcaagtgcctctgtgacatgaagcgcacggaggaggctttgggcgctgctccacaggatgcccgacgacctgcc

SEQ ID NO: 2930 - DNA, 459 bp, Triticum aestivum; identical to SEQ ID NO: 2929
  source 1..459: mol_type = genomic DNA

SEQ ID NO: 2931 - DNA, 459 bp, Triticum aestivum; identical to SEQ ID NO: 2929
  source 1..459: mol_type = genomic DNA

SEQ ID NO: 2932 - DNA, 459 bp, Triticum aestivum; identical to SEQ ID NO: 2929
  source 1..459: mol_type = genomic DNA

SEQ ID NO: 2933 - DNA, 732 bp, Triticum aestivum
  source 1..732: mol_type = genomic DNA
atgccccgccgcatcccgctgccgatgccccgccgcatatgcatctggctccgctgctcctccccatcctcatcctgcacctatcccgactccggtctccgccacccgtcctgccttacctctacgttgtccggcctccgcctccgccgctccttcaccactccgatgtcgaacctccgcctcttccgccgcagctcctcctccacctccacccccacctcgcggtcctcacgttcatggtctccccacgcagcctttgccgcggccacagagcgtgtccgcgccgggacgatgaaccaagactacgcacacaacctgttcgacgaattgctgcggcaggccaccccggtccccgggcgctccctgaatggcttcctcgccgccctcgcacgtgctacgtcctctgccgcctgcatcagaaatggtcccgccctcaccgtcgccctcttcaaccgcgtgtgccgagaacaagccggcctgcgggtggcgcctctcacagtccacacgtacaacatcctcatggactgctgctgccgcgcatctcgcccggacctaggtcttgccttattcggccgctttctcaggacgggcctcaagacaaacgagatcgtcgccagcaccctcctcaagtgcctctgctacacaaaacggacggatgaggctctgaacgtgctgcttcataggatgtccgagctcggctgttgcctaatgccatctcatacaacattgttc

SEQ ID NO: 2934 - DNA, 732 bp, Triticum aestivum; identical to SEQ ID NO: 2933
  source 1..732: mol_type = genomic DNA

SEQ ID NO: 2935 - DNA, 732 bp, Triticum aestivum
  source 1..732: mol_type = genomic DNA
atgccccgccgcatcccgctgccgatgccccgccgcatatgcatctggctccgctgctcctccccatcctcatcctgcacctatcccgactccggtctccgccacccgtcctgccttacctctacgttgtccggcctccgcctccgccgctccttcaccactccgatgtcgaacctccgcctcttccgccgcagctcctcctccacctccacccccacctcgcggtcctcacgttcatggtctccccacgcagcctttgccgcggccacagagcgtgtccgcgccgggacgatgaaccaagactacgcacacaacctgttcgacgaattgctgcggcaggccaccccggtccccgggcgctccctgaatggcttcctcgccgccctcgcacgtgctacgtcctctgccgcctgcatcagaaatggtcccgccctcaccgtcgccctcttcaaccgcgtgtgccgagaacaagccggcctgcgggtggcgcctctcacagtccacacgtacaacatcctcatggactgctgctgccgcgcatctcgcccggacctaggtcttgccttattcggccgctttctcaggacgggcctcaagacaaacgagatcgtcgccagcaccctcctcaagtgcctctgctacgcaaaacggacggatgaggctctgaacgtgctgcttcataggatgtccgagctcggctgttgcctaatgccatctcatacaacattgttc

SEQ ID NO: 2936 - DNA, 732 bp, Triticum aestivum; identical to SEQ ID NO: 2933
  source 1..732: mol_type = genomic DNA

SEQ ID NO: 2937 - DNA, 732 bp, Triticum aestivum; identical to SEQ ID NO: 2933
  source 1..732: mol_type = genomic DNA

SEQ ID NO: 2938 - DNA, 732 bp, Triticum aestivum; identical to SEQ ID NO: 2933
  source 1..732: mol_type = genomic DNA

SEQ ID NO: 2939 - DNA, 756 bp, Triticum aestivum
  source 1..756: mol_type = genomic DNA
atgagggtgacatatagctccataatcaatgcgctatgcaaagcaagagcaatggataaggcagaggtgatccttcgacatatggttcataatggtgtccaaccacatgataggatatataataccctaatccatggatttttaactttgggtcagctgaaagaagcctttaggttgttgaaagtaatgagaagccaaggtagtatgccaaacggtgttacttgcacctcagtcatggactacctttgcaagcatggaagaatcaaagaagctgaggaaatattttattccatggccgtgaatggccgaaaaccagatatagtctcatactctattatgctccatgggtacgctatagaaggatcccttgttcaaatgattgatctctgtgagctgatggcaagagacggagttgtacccaacctccggtgtttcaacatactgattaatgcatatgctaagtatggcaggatggatgtggccatgcttttctttgaagacatgttgaagcagggtgtgaagcctaatgaattcacttatttaaccgtgatatctgcattttgcaagatgggcaggatggatgatgcgatggaaaagttcagtgagatgattgatatgggagtaccacttgagacagaagtttacatgtgcatggttgagggttattttaatcatggtgattccatgaaagccgaggaatttattaccaagatgaagaacagggatattcatcataagccatggaaaggtaatcga

SEQ ID NO: 2940 - DNA, 729 bp, Triticum aestivum
  source 1..729: mol_type = genomic DNA
atgatgcagcaaggtgtcgagcccagtgtgtggacatatagttcaatcattgatgcattgtgcaaggcaagagcaatggacaaggcagagctagtgcttcagcagatggttaacaaaggtgttcaacccaataatgtcacatataattgcatgatccatggatattccacatctgggaggtggaaagaggctgctaaattgtttagagaaatgaaaagccggggccttataccagatacttttacttgcaacgccttaatgacttacctttgtaagcatggaagaagcaaagaagctgcagaaatttctgatgccatgactgccaaaggccacaagccggatatcgtctcatacagtattttgcttcatgggtatgccaatgaaggatgctttgctgatatgattgatctctttaattcaatggaaaggaacggcattgcagccgactgccatgttttcagcatattaatcggtgcgtatgctaaatgtgaattaatggatgaagctatgctcaaatttactcaaatgcggcgacaaggagtgagtcctgatgcgttcacatattcaactgtaatagtcgcactttgtagagtgggtaggctggctgatgcaattggcaaatttggtgagatgattgctatgggagtacagccggacagacctgtttatcgctccctaattcagggttgttttatgcatggtggcttggttaaagccacagctggtttc

SEQ ID NO: 2941 - DNA, 729 bp, Triticum aestivum; identical to SEQ ID NO: 2940
  source 1..729: mol_type = genomic DNA

SEQ ID NO: 2942 - DNA, 729 bp, Triticum aestivum; identical to SEQ ID NO: 2940
  source 1..729: mol_type = genomic DNA

SEQ ID NO: 2943 - DNA, 729 bp, Triticum aestivum; identical to SEQ ID NO: 2940
  source 1..729: mol_type = genomic DNA

SEQ ID NO: 2944 - DNA, 729 bp, Triticum aestivum; identical to SEQ ID NO: 2940
  source 1..729: mol_type = genomic DNA

SEQ ID NO: 2945 - DNA, 729 bp, Triticum aestivum; identical to SEQ ID NO: 2940
  source 1..729: mol_type = genomic DNA

SEQ ID NO: 2946 - DNA, 675 bp, Triticum aestivum
  source 1..675: mol_type = genomic DNA
atggttcataatggtgtccaaccagatgttgtgacatataatagcttgatccaaagatttttaacttcggggcagctgaaagaagccattaggttgttgaaactgatgacaagccaaggtattatgccagacgttgttacctgcaactcagtcatgacctaccattgcaagaatggaagagtcaaagaagctgccgaaatattttattccatggctgtgaagggccgaaaacctaatgtcatctcatactctattatgctccatgggtacgctatacaaggaccccttgttgaaatgattgacctctgtgagctgatggcaagagatggagttgtacccaacctccattgtttcaacatactgattaatgcatatgctaagtatggtaggatggatgtggccatgcttttctttgaagacatgttgaagcagggtgtgaagcctaatgaattcacttatttaactatgatgtctgcattttgcaagatgggcaggatggatgatgtgatggaaaaattaagtgagatgattgatatgggagtaccagttgacacagaagtttgcatgtgcatggttgagggttattttaatcatggtgattccatgaaagccaaggaatttattaccagaatgaagaacatggatattcatcataagccacggaaaggtaatcga

SEQ ID NO: 2947 - DNA, 675 bp, Triticum aestivum; identical to SEQ ID NO: 2946
  source 1..675: mol_type = genomic DNA

SEQ ID NO: 2948 - DNA, 675 bp, Triticum aestivum; identical to SEQ ID NO: 2946
  source 1..675: mol_type = genomic DNA

SEQ ID NO: 2949 - DNA, 675 bp, Triticum aestivum; identical to SEQ ID NO: 2946
  source 1..675: mol_type = genomic DNA

SEQ ID NO: 2950 - DNA, 675 bp, Triticum aestivum; identical to SEQ ID NO: 2946
  source 1..675: mol_type = genomic DNA

SEQ ID NO: 2951 - DNA, 651 bp, Triticum aestivum
  source 1..651: mol_type = genomic DNA
atggaaaaagctttgagagtacttgatgacatggcatccgctggcattgagcctaatgttgttacatatggtacacttgttgacggctactgtagaagtggaaggattgatgatgggttgatgctattcagagaaatgttgcataagagagttgaacctacaactgttacctataacatcatactgaatgggttatttcatgctgggagaacggttgctgcaaagatgttccatgagatgatcaaaagtggaataacagtgagcatttccacatacaggataatccatggaggattttgcaggaatagtcatgctgacgaagcgatcaccctgttccagaaattaggagcaatggatgtgaagttggatgttacaatactcaataccatgatcaatgcaatgttcaaggttcagagaagagaagaagctaacgatttgtttgctgcaatatctgccagtggattggtacctaatgcttctacttatggcaaaaatatacaaaatcttctagaaggaggatcattggaagaagctgacgatatgttttcatcaatggagaagagtggttgtgctcccagttcttgtcttttaaatcagaacgttattggaaaagggggagatagtcaaggctggaaattatctctactcata

SEQ ID NO: 2952 - DNA, 651 bp, Triticum aestivum; identical to SEQ ID NO: 2951
  source 1..651: mol_type = genomic DNA

SEQ ID NO: 2953 - DNA, 729 bp, Triticum aestivum
  source 1..729: mol_type = genomic DNA
atgagccgccgcctcgtccccgtcggcagccgcctcttggagcggaacatcgagcaccgataccgctccagaaacattggtaccgaggacgcactcaacctgttcggcgaattgatccaggatcctgggcctacctcggtccgcgccatcaacggcctcctcaccgtcgtcggccgtgattgccccgcactcggcatctccctgttcaaccgtgttgcaagagccaaggtgcctccccacaatatcacctatggcattctagttgactgctgctgccgtgctggccgcttggaccttggacacgctgccatgggacacgtcattaagttgggatttgcagcagaagccatcgtcaatttcagccacctactcaaggccatctgtgcggagaagaagaccagctatgcaatggacatcgtactccgaataatgcccatgtttaactgcataccgaacattttctcctacagcattcttttcaagggtctctgcaacgagaagagaagccaagaggctctcgagctgattcacttgatggttgaggatggaggtagctgccaacctaatgtcgtgtcctataccaccgtagttgatggtttgttgaaagagggtgaggtaggcaaggcttacagcctattttgtgaaatgctacagaggggaatttcgccggatgatgtgacatataactcaatcatctctggcatgtgcaaggttcatgcgatggaaggc

SEQ ID NO: 2954 - DNA, 738 bp, Triticum aestivum
  source 1..738: mol_type = genomic DNA
atggagaaaggaggtgtctgctcccctgatgtggtgtcatataccacggtcatccacggcctccttaaggaaggggaagtaagcaaggcatgcagtctgtttgatgaaatggtgcagcaaggggttgtgcctaatgtggtgacatacagctcgattattgatgcgctgtgcaaggctggagcgatggacaagacagagttggtcctttggcagatggttgatagtggcatccaaccggataacgtgacatatactagcatgatccacggatattccacgttgggccggtggaaagaagcaggcaaaatgttcagagaaatgacaagccggggtatcataccagatgttgttacttggacctcattcatgacctccctctgcaagcatggaagaagcagagaagctacaggaattattgattacatgtctgccaagtgccacaagcctaatatcgtcttgtactctattctgtttcatggatatgctacagaaggatgctttgatgatatgattaatctccttgactcgatggcaaacaacgctattgttcccaatcgccaggttttcagcattttagttgatgcatatgctaaacgtggaatgatggacgaagctatgcccatatttactggaatgtgtgaacaaggagtgatccgagatgtttacagatggggacaaggagtgagtccagagtctacagtaggtaggctggcggatgctttgaacaagttcgtcaga

SEQ ID NO: 2955 - DNA, 738 bp, Triticum aestivum; identical to SEQ ID NO: 2954
  source 1..738: mol_type = genomic DNA

SEQ ID NO: 2956 - DNA, 738 bp, Triticum aestivum; identical to SEQ ID NO: 2954
  source 1..738: mol_type = genomic DNA

SEQ ID NO: 2957 - DNA, 738 bp, Triticum aestivum; identical to SEQ ID NO: 2954
  source 1..738: mol_type = genomic DNA

SEQ ID NO: 2958 - DNA, 738 bp, Triticum aestivum
  source 1..738: mol_type = genomic DNA
atggagaaaggaggtgtctgctcccctgatgtggtgtcatataccacggtcatccacggcctccttaaggaaggggaagtaagcaaggcatgcagtctgtttgatgaaatggtgcagcaaggggttgtgcctaatgtggtgacatacagctcgattattgatgcgctgtgcaaggctggagcgatggacaagacagagttggtcctttggcagatggttgatagtggcatccaaccggataacgtgacatatactagcatgatccacggatattccacgttgggccggtggaaagaagcaggcaaaatgttcagagaaatgacaagccggggtatcataccagatgttgttacttggacctcattcatgacctccctctgcaagcatggaagaagcagagaagctacaggaattattgattacatgtctgccaagtgccacaagcctaatatcgtcttgtactctattctgtttcatggatatgctacagaaggatgctttgatgatatgattaatctccttgattcgatggcaaacaacgctattgttcccaatcgccaggttttcagcattttagttgatgcatatgctaaacgtggaatgatggacgaagctatgcccatatttactggaatgtgtgaacaaggagtgatcccagatgtttacagatggggacaaggagtgagtccagagtctacagtcggtaggctggcggatgctttgaacaagttcgtcaga

SEQ ID NO: 2959 - DNA, 738 bp, Triticum aestivum; identical to SEQ ID NO: 2958
  source 1..738: mol_type = genomic DNA

SEQ ID NO: 2960 - DNA, 675 bp, Triticum aestivum
  source 1..675: mol_type = genomic DNA
atgagccgccgccttgtccccgtcggcagacgcatcttggagcagagcatcaaggatcggtactactcggcaggcattggcaccgaggatgcactccagctgtttgacgaattgctcccggatgctgagccatccttgatccgtgccatcaactgcctcctcactgtcatcggccgtgattgccccgcgctcggcgtctcccacttcaaccgcgttgcaagggccaatgtggcacccaacagtatcacgtacaccatcctcgtcgactgctgctgccgtgctggccgcttggacctcggtttcgccgccatgggccacattattaagatgggatttacagcagaagctatcttcactttcaaccacctactcaaggccatctgtgcggagaagaagaccagctatgcaatggacatcgtactccgaataatgcctgagcttaactgcacaccgaatgttttctcctacaacattcttttcaagggtctctgcaacgagaagagaagccaagaggctctcgagctgattaacattatggttgaggatggaggtagctgccgacctgatgtggtgacctataacaccgtaattggtggcctgttgaaagagggtgtggtggacaaggcttacagcctattttgtgaaatgctaaaaggcagattttgccaaatgctg

SEQ ID NO: 2961 - DNA, 675 bp, Triticum aestivum; identical to SEQ ID NO: 2960
  source 1..675: mol_type = genomic DNA

SEQ ID NO: 2962 - DNA, 675 bp, Triticum aestivum; identical to SEQ ID NO: 2960
  source 1..675: mol_type = genomic DNA

SEQ ID NO: 2963 - DNA, 675 bp, Triticum aestivum; identical to SEQ ID NO: 2960
  source 1..675: mol_type = genomic DNA

SEQ ID NO: 2964 - DNA, 675 bp, Triticum aestivum; identical to SEQ ID NO: 2960
  source 1..675: mol_type = genomic DNA

SEQ ID NO: 2965 - DNA, 675 bp, Triticum aestivum; identical to SEQ ID NO: 2960
  source 1..675: mol_type = genomic DNA

SEQ ID NO: 2966 - DNA, 666 bp, Triticum aestivum
  source 1..666: mol_type = genomic DNA
atgacaaatcggagtgttacaccagatgtgtgtacttacaacttgttgatgacctccctttacaagaatggaaatagcaaagaagctgcacaattgttttattcaatggccacgaagggcctgaaacctgacaccgtttcatatgctattctccttcatgggtatgccactgaaggatgcttggttgacatgatcaatctcttcaattcaatggcaacagactgtattctacctaactgtcatatcttcaacatactgatttatgcatatgctaaatctgggaagcttgataaggctatgcttatatttaaagatatgcagaaacaaggagtgagtccagatgcagtcacatattcaaccgtaatacatgcattttgcaaaaagggtaggttggatgatgctgtgataaagtttaatcagatgattgatacaggagtacgaccggaagcatctgcttatcgttccctaatccagggtttttgtacacatggcgatttggtgaaagcaaaggaatatgttactgaaatgatgaagaaaggtatgcttcctcctgatattatgttcttcagttcaatcatgcagaaactatgcacagaaggaagggaaattatatatcgaaagttgatgcaaagagctactcacttgaagctaaaactgtttcgctgc

SEQ ID NO: 2967 - DNA, 717 bp, Triticum aestivum
  source 1..717: mol_type = genomic DNA
atggttcatagcggtgttcgaccggatactgtgacatatactagcctgatccatggatattctactttgggccagtttgaagaggttgttaggttgttggaagaaatgagaagtctaggtgtcaaaccaaatgtttttacttgtaacacagtcatggactacctttggaagcatggaagaatcaaagaagctgcagaatttttttattccatggctgagaagggccataaacctaatatagtctcgtatgctattatgcttcatgggtacgctaaagaaggatcccttgttgaaatgagtgatctctgtgagctgatggcaagagatggtattgtacccgatctccgttgtttcaacatactgattaatgcatatgctaagtgtggaatgatggatgtggctattcttttcttcaaagacatgttgaagcagggagtgaaccctgatgaaatcacatatttagctgtgatagccgggtattgcagagtgggcatgatggatgatgctatggaaaatttcaatgagatgatcggtatgggagtaccacataacgcaactgtttacaggtgcatgattcagggttacttaaatcatggtgatttcttgaaagcaaaggaattgattactgaaatgaagaccaagggtatccatcctagaccgcggaaaagccaaggaattgatccagggtacctcatgacgcaactgtttacaggtgca

SEQ ID NO: 2968 - DNA, 651 bp, Triticum aestivum
  source 1..651: mol_type = genomic DNA
atgtcccgcatccacctccaccgtcgcctcttctcctccaccacgcggcccttgcgttcctggtctccccgcgccgcctttgccgcggtaacagagcgcgtccgcgctggggcgctcagccaagacgatgcacaccacctgttcgacgaattgctgcggcaggccaccccggtccccgggcgctccctcgacggcttccttgccgccctcgtccgtgcgcccgcctccggagcctgcagagatgggcccgccctcgccctcgctctcttcaaccgcgtctgccgggatgaatccggcgcgcgggtggcaccgcccacaatcttcacctacggcatcctcatgaactgctgctgccgcgcgcatcgcccggacctagggctcgccttcttcgctcgcctcctcacgacgggcctgaaggctgaccagatcgccgccaacaccttccttaagtgcctctgttacgcaaaacggacggatgaagctgtgaacgtgctgcttcataggatgtccgagctcggctgtgtgcctaatgccttctcatactccattgttctgaagagcttatgcgacaatagcatgagtcagcgggcgctcgacctgctccagatgatgaccagatggagaaatgacaagtcagggtcttataccaga

SEQ ID NO: 2969 - DNA, 651 bp, Triticum aestivum
  source 1..651: mol_type = genomic DNA
atgtcccgcatccacctccaccgtcgcctcttctcctccaccacgcggcccttgcgttcctggtctccccgcgccgcctttgccgcggtaacagagcgcgtccgcgctggggcgctcagccaagacgatgcacaccacctgttcgacgaattgctgcggcaggccaccccggtccccgggcgctccctcaacggcttccttgccgccctcgtccgtgcgcccgcctccggagcctgcagagatgggcccgccctcgccctcgctctcttcaaccgcgtctgccgggatgaatccggcgcgcgggtggcaccgcccacaatcttcacctacggcatcctcatgaactgctgctgccgcgcgcatcgcccggacctagggctcgccttcttcgctcgcctcctcacgacgggcctgaaggctgaccagatcgccgccaacaccttccttaagtgcctctgttacgcaaaacggacggatgaagctgtgaacgtgctgcttcataggatgtccgagctcggctgtgtgcctaatgccttctcatactccattgttctgaagagcttatgcgacaatagcatgagtcagcgggcgctcgacctgctccagatgatgaccagatggagaaatgacaagtcagggtcttataccaga

SEQ ID NO: 2970 - DNA, 651 bp, Triticum aestivum; identical to SEQ ID NO: 2969
  source 1..651: mol_type = genomic DNA

SEQ ID NO: 2971 - DNA, 651 bp, Triticum aestivum; identical to SEQ ID NO: 2968
  source 1..651: mol_type = genomic DNA

SEQ ID NO: 2972 - DNA, 651 bp, Triticum aestivum; identical to SEQ ID NO: 2969
  source 1..651: mol_type = genomic DNA

SEQ ID NO: 2973 - DNA, 651 bp, Triticum aestivum; identical to SEQ ID NO: 2968
  source 1..651: mol_type = genomic DNA

SEQ ID NO: 2974 - DNA, 603 bp, Triticum aestivum
  source 1..603: mol_type = genomic DNA
atgacacgcctccactccaccatggcgtgcgcgtgccgcgtccgcatccgctgccgccgcctctcctcctccgccacctcgccgtcctcgcgctcctggtctccccgcgccgccttcgccgcgtccacagagcgcttccgcgccggcacgctcggccggccagacgcacaccgcctgttcgacgaattgctacggcgggacaccctggtccccagctgctccctgaacggcctccttcccgtgctcgcccgcgccacgtcctcggcatcctgcgtcacagatgggcccgccctcgccgtcgccctcttcagccgcgtgctccgagcggaagccggtccgtgggtggcgtgtcccacagtgtgcacctatggcatcctcatggactgttgctaccgtgtgcgtcgcccggacctaggacgagcctcaggacgggcctcaaggcagaccaggtcgtcgccaacaactcgctcaagtgcctctgctacgccaagcggaccgacgaggccgtcggcatgctgcttcatgggatgcccgacctcagctgtatgcctaatgccgtctcatacaacatttcgtaagaggttatctgaggatagaaggagc

SEQ ID NO: 2975 - DNA, 603 bp, Triticum aestivum; identical to SEQ ID NO: 2974
  source 1..603: mol_type = genomic DNA

SEQ ID NO: 2976 - DNA, 603 bp, Triticum aestivum; identical to SEQ ID NO: 2974
  source 1..603: mol_type = genomic DNA

SEQ ID NO: 2977 - DNA, 603 bp, Triticum aestivum; identical to SEQ ID NO: 2974
  source 1..603: mol_type = genomic DNA

SEQ ID NO: 2978 - DNA, 603 bp, Triticum aestivum; identical to SEQ ID NO: 2974
  source 1..603: mol_type = genomic DNA

SEQ ID NO: 2979 - DNA, 603 bp, Triticum aestivum; identical to SEQ ID NO: 2974
  source 1..603: mol_type = genomic DNA

SEQ ID NO: 2980 - DNA, 708 bp, Triticum aestivum
  source 1..708: mol_type = genomic DNA
atggactggccacctagcactggtacaacatggaaaagcactaaccgcatcgatcgtctcccactcgagtcgtcttgctcagcgttcacgacccacacatccaaggccatgcctcgcttctcctccaccccgccaatgtcgccaccccgcctccgcgtcggactcggcgccggccactcctcctccacctctcatccctcacgcatctgggatccccacgccgccttcgccgccgccacggagcgtgcgcgctctggcaacctcaccccggaggacgcacaccacctgttcgacgaattgctccggcagggcaatcctgtccaggagcgccccctcaacaaccttcttgccgccctcgcccgcgctccggcgtccgcggcgtgcagcgatggccctgcactcgcagtcaacctcttcagccgcatatcccaaggcgcccgccgacgtgtggcacacccaacggcctgcacctacagcatcctcatggactgctgctgccgcgtacaccgcctcgatctggcgttcgctttcttcgcccgtctcctcaggacgggacttaaggcaaaccaagtcatcttctgcaccctcctcaagggactctgccatgcaaagcgcacagatgaggctctggacgtgctgctgcacaggatgcctgagctgggctgcacccccaacgcggtggcgtataaccctatctcagtttgtata

SEQ ID NO: 2981 - DNA, 708 bp, Triticum aestivum; identical to SEQ ID NO: 2980
  source 1..708: mol_type = genomic DNA

SEQ ID NO: 2982 - DNA, 729 bp, Triticum aestivum
  source 1..729: mol_type = genomic DNA
atggattatctttgcaagagcggaagatgcggagaagctaggaagctttttgattctatgatcagtttgggccaaaaaccgacggttactacatacaacattttgctccatgggtatgccatggaaagatattttcatgatatgcattgtctcatcgatttgatggcagaaaatggcatttcaccggatcattatgtctacaacatactgatatttgcatatgctaaagaaaaaatggttggtgaggtaatgcatatatttacaaaaatgcggcaacaaggattcaaccctgatgcagcgagctatgggacgggaataaacttactttgcagcattggccgaatggatgatgctgtgttgcaattcaatcaaatggtaacggaaggattagctcctgatatcatagttttcaccacccttttgagtggtttttgttcttgtggcaaatgggagaaggtccatgaactattttctgaaatgttgaatcgtggaatctatcccaatgctgtgttcttcaacaaaattatgagccccctttgcaaaaatggaagggttatggcagcccaagatctctttgacctgatgatacacatgggtgtaaagccggacatgcatgcttataacacgatgatgggtggatacatgttcgttggcaagatggatgaagtgaggaagttacttgacaatatggtctcaactggcctggaaccagatattttcacatatgga

SEQ ID NO: 2983 - DNA, 729 bp, Triticum aestivum; identical to SEQ ID NO: 2982
  source 1..729: mol_type = genomic DNA

SEQ ID NO: 2984 - DNA, 717 bp, Triticum aestivum
  source 1..717: mol_type = genomic DNA
atgctattatgtatggtatacttcttaatgatcactgatggattgagtcttttcatggaaatgtcactcagcggggtgaagcccactactattatgtacaacattatacttgatgggctgttttgctctgggagaacagtttctgcaaaggaaaaatttgatacgatgattgaaagtggcataccagtgggcattgacacatacaacatagttcttagtggactttgtaaaaacaattgcactgatgaagcaatagagctattcaagaaattacgtgctatgaacgtgaagattgatgtcataactctcaataccatgatttctgcaatgtttaaaactaggagaattgaagaagccaaggatttgtttgctactatatcagccattgggttagtgccttctgttgtaacttacattttaatgataacgaatttcattaaagaagggctgctagcagaggctgatgatatgtttttagcaatggagaaggctggatgtgctccaaactccagtttgctaaatcaagtggtcagagtgttgctggaaaaaggtgcagctgtacaggctgcaacttatctggctaaaattgatgcaaaacatctgtcacttgaagcttcaacggtttcgttaataatatctctcttctcaaggaaaggggaactatgggagcatgtaaaattgcttccggtaaagtaccagcctcctgagatgttcgac

SEQ ID NO: 2985 - DNA, 717 bp, Triticum aestivum; identical to SEQ ID NO: 2984
  source 1..717: mol_type = genomic DNA

SEQ ID NO: 2986 - DNA, 717 bp, Triticum aestivum; identical to SEQ ID NO: 2984
  source 1..717: mol_type = genomic DNA

SEQ ID NO: 2987 - DNA, 717 bp, Triticum aestivum; identical to SEQ ID NO: 2984
  source 1..717: mol_type = genomic DNA

SEQ ID NO: 2988 - DNA, 717 bp, Triticum aestivum; identical to SEQ ID NO: 2984
  source 1..717: mol_type = genomic DNA

SEQ ID NO: 2989 - DNA, 717 bp, Triticum aestivum; identical to SEQ ID NO: 2984
  source 1..717: mol_type = genomic DNA

SEQ ID NO: 2990 - DNA, 726 bp, Triticum aestivum
  source 1..726: mol_type = genomic DNA
atgatgaacagaggtattcctcattctaacattccattcttcggttccgtaataaagaatctgtgccaagaaggaagggttatggacgcacatgaaatctttgacttggttatagacatgggtgagaggcctgatgacattttatttaattcactgattgttggatactgcttagtcgggaagatggataaagcattaaaagtacttgatgtcatggaatcagttggtgttgagcctgatgttattacatataatacacttgttaatggctattgtaaaagtggaaggatcgatgatggtttcgttctattcagagaaatgccgagtaagagagttaaacctgacactgttacatatggcatcatactggcagggttgtttcgtgcttggagaactgttgatgcaaggacaatgttccatgagatgatcgaaagtggaataacagtggacatcgtcacatacaatataattcttacaggactctgtagaaataattgcatagatgaagcgatcgccctgttccagaaattaggtgtaatgagtgtgaagttcaatattgcaatactaaataccatgatcgatgcaatgtacaaggtttggagaagagaagaagtcagtgatttatttgctgcaatatcagccagcactagtagaaaaacacctattagtcccggttcgttagggcctttagtcctggttcatgaaccgggactaatgggtcgttac

SEQ ID NO: 2991 - DNA, 678 bp, Triticum aestivum
  source 1..678: mol_type = genomic DNA
atgggtaaggcagagttgttccttcggcgaatggttgataacagtgttcaaccggatagggtgacatatactagcatgatccatggatattccactttgggccggtggaaagaggcgacgaaaatgttcagagaaatgacaggcaggggccttataccaaatattgtcacttggaactcgttcatggcctccctatgtaagcatggaagaagcaaagaagctgcagaaattttcttttccatggctgcaaagggcaataagcctaatatcatcacctacggtattcttcttcatgggtatggcaatgaaggaagctttgttgatatgatgagtctctttaattcaatgaaaggcaacggtattgtggccaaccgccaggttttcaacatattaattgatgcatatgctaaacgaggactgatagatgaagctgttctcatacttactgaaatgcggggacacggactgagtccggatgtattaccgaaaaagggtttccccccgctttgtatacaaagcaaccaaccgaaccatacagagataggtgttggggcggaagcagcacagtcacgcccaaaagaaacgacagagaaagagcaaaagaaacaaatgccgacaacggcggatcaacaaaaacgaagaagcctcgcgatcgctgcacccaccgggatcttccac

SEQ ID NO: 2992 - DNA, 678 bp, Triticum aestivum; identical to SEQ ID NO: 2991
  source 1..678: mol_type = genomic DNA

SEQ ID NO: 2993 - DNA, 678 bp, Triticum aestivum; identical to SEQ ID NO: 2991
  source 1..678: mol_type = genomic DNA

SEQ ID NO: 2994 - DNA, 678 bp, Triticum aestivum; identical to SEQ ID NO: 2991
  source 1..678: mol_type = genomic DNA

SEQ ID NO: 2995 - DNA, 678 bp, Triticum aestivum; identical to SEQ ID NO: 2991
  source 1..678: mol_type = genomic DNA

SEQ ID NO: 2996 - DNA, 678 bp, Triticum aestivum
  source 1..678: mol_type = genomic DNA
atgggtaaggcagagttgttccttcggcgaatggttgataacagtgttcaaccggatagggtgacatatactagcatgatccatggatattccactttgggccggtggaaagaggcgacgaaaatgttcagagaaatgacaggcaggggccttataccaaatattgtcacttggaactcgttcatggcctacctttgcaagcatggaaaaagcaaagaagctacagaaattttcttttccatggctgcaaagggcaataagcctaatatcatcacctacggtattcttcttcatgggtatggcaatgaagaaagctttgttgatatgatgagtctctttaattcaatgaaaggcaacggtattgtggccaaccgccaggttttcaacatattaattgatgcatatgctaaacgaggactgatagatgaagctgttctcatacttactgaaatgcggggacacggactgagtccggatgtattaccgaaaaagggtttccccccgctttgtatacaaagcaaccaaccgaaccatacagagataggtgctggggcggaagcagcacagtcacgcccaaaagaaacgacagagaaagagcaaaagaaacaaatgccgacaacggcggatcaacaaaaacgaagaagcctcgcgatcgctgcacccaccgggatcttccac

SEQ ID NO: 2997 - DNA, 555 bp, Triticum aestivum
  source 1..555: mol_type = genomic DNA
atggttgaaagtggaacaacagtgagcatttcaacatacggtataattcttggagaactttgtaggaataattgcactgaggaagcaatcatactgttccacaaattaggtgcaatgaacgtgaagttcgatattacaatattcaataccatgattgatgcaatgtacaaggttcgaagaagagaagaagctaacattttgtttgctgcaatatctgccaatggattggtacctaatgcttctacctacagaataatgataacaaatcttttaaaagaaggatcaatggaagaagctgatcatatgttttcatcaatggagacgagtggttatgctcccagctccgttctattaaatgctatcatcagaatgttgttagaaaaaggtgagatagtcaaggctggaaattatttgtctaaagttgatgggaagagcatctcacttgaagcttcaactagtttgttgatgtggcatctattttcaacggaaggaaaatatcatgagcaaataaaatcactccctgaaaggtatcgatttttcggagtcagacacagt

SEQ ID NO: 2998 - DNA, 555 bp, Triticum aestivum; identical to SEQ ID NO: 2997
  source 1..555: mol_type = genomic DNA

SEQ ID NO: 2999 - DNA, 555 bp, Triticum aestivum; identical to SEQ ID NO: 2997
  source 1..555: mol_type = genomic DNA

SEQ ID NO: 3000 - DNA, 555 bp, Triticum aestivum; identical to SEQ ID NO: 2997
  source 1..555: mol_type = genomic DNA

SEQ ID NO: 3001 - DNA, 555 bp, Triticum aestivum; identical to SEQ ID NO: 2997
  source 1..555: mol_type = genomic DNA

SEQ ID NO: 3002 - DNA, 555 bp, Triticum aestivum; identical to SEQ ID NO: 2997
  source 1..555: mol_type = genomic DNA

SEQ ID NO: 3003 - DNA, 555 bp, Triticum aestivum; identical to SEQ ID NO: 2997
  source 1..555: mol_type = genomic DNA

SEQ ID NO: 3004 - DNA, 663 bp, Triticum aestivum
  source 1..663: mol_type = genomic DNA
atgccccgcctccgcctccgtcgcttctccaccgcgccgatgttccacctcctccgccgcagctcctcctccacctccacctcgccgccctcgcgttcctggtctccccacgccgcctttgccgccgcgacggagtgtgtccgtgccgggacgctcagccctgaagacgcgcaccacctgttcgacgaattgctacggcaggccaccccggtccccgagcgccccctcaacggcttccttgccgccctcgcccgtgcgcccgcctcggccgcctgcattagagatggccccgcccttgccgtcgctctcttcaaccgcgtgtgccgagaagaagccggcctgcaggtggcagcgcccacagtttgcacctacaacatcctcatggactgctgctgccgcgcgcatcgcccggacctagggcttgccttctttggtcgtttcctcaggacaggcctgaagacagaacagatcaccgtcagcaccttcctcaagtgcctctgctacgccaaacggacggaagaggctgtgaacgtgctgcttcatgggatgtccgagctcggctgtgtgccgaatgcaatctcatactccattgttctgaagagcttatgcaagaatagcatgagtcagcgggcactcgacctgctctttcagtgtggtggcata

SEQ ID NO: 3005 - DNA, 663 bp, Triticum aestivum; identical to SEQ ID NO: 3004
  source 1..663: mol_type = genomic DNA

SEQ ID NO: 3006 - DNA, 663 bp, Triticum aestivum; identical to SEQ ID NO: 3004
  source 1..663: mol_type = genomic DNA

SEQ ID NO: 3007 - DNA, 534 bp, Triticum aestivum
  source 1..534: mol_type = genomic DNA
atggacatggcacttcggataatgcccaagtttaactgcataccggatgttttctcctacaacattcttttcaagggtctatgcaccgagaaaagaagccaagaggctctagagctgattcacgtcatggctgaggatggaggtagctgccaacctaatgtggtgtcctatagcaccgtagttgatggcttgttgaaagagggtgaggtggacaaagcttacagcctattttgtcaaatgctaaagaggcgaatttcgccgaatgttgtgacctgtagttcaatcatctctgtcatgtgcaaggttcatgcgatggacaaggctgagcaggttcttcaacagatgtttgatacaagaattctgccaaatgttgctacatatactagtctgatacaaggatactattcattaggacactgcgaagaggtggattggattttcaagaaaatgtctagaaatggtgttcaaccaaatattgtagcttacaaacatacggatggattatctttgcaagagcggaagatgcgcataagc

SEQ ID NO: 3008 - DNA, 534 bp, Triticum aestivum; identical to SEQ ID NO: 3007
  source 1..534: mol_type = genomic DNA

SEQ ID NO: 3009 - DNA, 534 bp, Triticum aestivum; identical to SEQ ID NO: 3007
  source 1..534: mol_type = genomic DNA

SEQ ID NO: 3010 - DNA, 534 bp, Triticum aestivum; identical to SEQ ID NO: 3007
  source 1..534: mol_type = genomic DNA

SEQ ID NO: 3011 - DNA, 534 bp, Triticum aestivum; identical to SEQ ID NO: 3007
  source 1..534: mol_type = genomic DNA

SEQ ID NO: 3012 - DNA, 534 bp, Triticum aestivum; identical to SEQ ID NO: 3007
  source 1..534: mol_type = genomic DNA

SEQ ID NO: 3013 - DNA, 591 bp, Triticum aestivum
  source 1..591: mol_type = genomic DNA
atgacctccacgccgatgcgccggctcctcctctgtcgccgctcctcctcctcctccacctccacttcaccgccctcacgcccctggtctccccacgccgcctttgccgctgccacatggacgctcaccccgaaacacgcacaccacctgttcgacgaattgctacggcaggacactccggtccccgagcgctccctggacggcttccttgccgctctcacccgtgctagttcctctgcgtcctgcagagatggccccgccctcgcgctcgacctcttcagccacttgtgccgcgaagaagccggccctcgggtggcgccgcccacaatctttacctacggcgttctcatgaactgctgctgccgcactcgtcgctcgcaactggggcttgccttcttcggccgtctcctcaggacgggcctgaagacaaacacgatcgtcttcagctccctcctcaagtgcctctgccacgccaaatgggcagacgaggctgtcagcgtgctgcttcataggatgtccgagctcggttgtgtgcctgatgccttctcatacaccattgttcttaagagcttatgtgatgctagcagcagc

SEQ ID NO: 3014 - DNA, 591 bp, Triticum aestivum; identical to SEQ ID NO: 3013
  source 1..591: mol_type = genomic DNA

SEQ ID NO: 3015 - DNA, 591 bp, Triticum aestivum; identical to SEQ ID NO: 3013
  source 1..591: mol_type = genomic DNA

SEQ ID NO: 3016 - DNA, 591 bp, Triticum aestivum
  source 1..591: mol_type = genomic DNA
atgacctccacgccgatgcgccggctcctcctctgtcgccgctcctcctcctcctccacctccacttcaccgccctcacgcccctggtctccccacgccgcctttgccgctgccacatggacgctcaccccgaaacacgcacaccacctgttcgacgaattgctacggcaggacactccggtccccgagcgctccccggacggcttccttgccgatctcacccgtgctagttcctctgcgtcctgcagagatggccccgccctcgcgctcgacctcttcagccacttgtgccgcgaagaagccggccctcgggtggcgccgcccacaatctttacctacggcgttctcatgaactgctgctgccgcactcgtcgctcgcaactggggcttgccttcttcggccgtctcctcaggacgggcctgaagacaaacacgatcgtcttcagctccctcctcaagtgcctctgccacgccaaatggacagacgaggctgtcagcgtgctgcttcataggatgtccgagctcggttgtgtgcctgatgccttctcatacaccattgttcttaagagcttatgtgatgctagcagcagc

SEQ ID NO: 3017 - DNA, 591 bp, Triticum aestivum; identical to SEQ ID NO: 3013
  source 1..591: mol_type = genomic DNA

SEQ ID NO: 3018 - DNA, 591 bp, Triticum aestivum; identical to SEQ ID NO: 3016
  source 1..591: mol_type = genomic DNA

SEQ ID NO: 3019 - DNA, 663 bp, Triticum aestivum
  source 1..663: mol_type = genomic DNA
atgtcactcagcggggttaagcccacgactattatatacaacattatactggatgggctgttttgctctgggagaacaggttctgcaaaggaaaaattccatacgatgactgaaagtggcataccagtaggcgttgacacatacaacatagttcttagtggactttgtagaaacaattgcactgatgaagcaatagaactgttcaagaaactacgtgcaacgaacgtgaagattgatgtcatgacactcaatatcatgatttctgcaatgtttaaaactaggagaattgaagaagccaaggatttgtttgctactatatcagccatagggttggtgccttctgttgtgacttacagtgtaatgatgacgaatttcataaaagaagggtcgctggcagaggctgatgatatgtttttagcaatggagaaggctagctgtgctcccaactccatcctgctaaatcaagtggtcagggcgttgctggaaaaaggtgcagttgtaaaggctgcaacttatctcgctaaacttgatgctaaacagctgtcagttgaagcttcaacgatttcgttaatagtatctctcttctcaggggaagggaaactaagggagcacgtagagttgcttccagtaaagtaccagcctcctgagagttcgactgacaat

SEQ ID NO: 3020 - DNA, 663 bp, Triticum aestivum; identical to SEQ ID NO: 3019
  source 1..663: mol_type = genomic DNA

SEQ ID NO: 3021 - DNA, 663 bp, Triticum aestivum; identical to SEQ ID NO: 3019
  source 1..663: mol_type = genomic DNA

SEQ ID NO: 3022 - DNA, 663 bp, Triticum aestivum; identical to SEQ ID NO: 3019
  source 1..663: mol_type = genomic DNA

SEQ ID NO: 3023 - DNA, 501 bp, Triticum aestivum
  source 1..501: mol_type = genomic DNA
atgtatatgtttgacttcattctaggtattggtcagcggcctgatgtgattatgtacaattcattgatggatggatattgccttgttggcaaggtggaggaagcagtgagagtacttgatgctatgaagtctgctggcctccaacctactactgttacgtatggtatacttcttaatggctactgtaaaattggaaggatcgccgctggattgagtcttttcaaggaaatgtcactcagcggggttaagcccattactattatgtacaacattatacttgatgggctgttttgctctgggagaacagtttgtgcaaaggaaaaattccatacgatgaatgaaagtggcataccagtgggcgttgacacatacaacatagttcttagtggactttgtaaaaacaattgcactgatgaagcaatagagctgttcaaggaattacgtgctaagaacgtgaagattaatgtcatgatactcaatactatgattttttgcaatgtt

SEQ ID NO: 3024 - DNA, 501 bp, Triticum aestivum
  source 1..501: mol_type = genomic DNA
atgtatatgtttgacttcattctaggtattggtcagcggcctgatgtgattatgtacaattcactgatggatggatattgccttgttggcaaggtggaggaagcagtgagagtacttgatgctatgaagtctgctggcctccaacctactgctgttacgtatggtatacttcttaatggctactgtaaaattggaaggatcgccgctggattgagtcttttcaaggaaatgtcactcagcggggttaagcccactactattatgtacaacattatacttgatgggctgttttgctctgggagaacagtttgtgcaaaggaaaaattccatacgatgaatgaaagtggcataccagtgggcgttgacacatacaacatagttcttagtggactttgtaaaaacaattgcactgatgaagcaatagagctgttcaaggaattacgtgctaagaacgtgaagattaatgtcatgatactcaatactatgattttttgcaatgtt

SEQ ID NO: 3025 - DNA, 501 bp, Triticum aestivum; identical to SEQ ID NO: 3024
  source 1..501: mol_type = genomic DNA

SEQ ID NO: 3026 - DNA, 501 bp, Triticum aestivum; identical to SEQ ID NO: 3024
  source 1..501: mol_type = genomic DNA

SEQ ID NO: 3027 - DNA, 501 bp, Triticum aestivum
  source 1..501: mol_type = genomic DNA
atgtatatgtttgacttcattctaggtattgctcagcggcctgatgtgattatgtacaattcattgatggatggatattgccttgttggcaaggtggaggaagcagtgagagtacttgatgctatgaagtctgctggcctccaacctactactgttacgtatggtatacttcttaatggctactgtaaaattggaaggatcgccgctggattgagtcttttcaaggaaatgtcactcagcggggttaagcccattactattatgtacaacattatacttgatgggctgttttgctctgggagaacagtttgtgcaaaggaaaaattccatacgatgaatgaaagtggcataccagtgggcgttgacacatacaacatagttcttagtggactttgtaaaaacaattgcactgatgaagcaatagagctgttcaaggaattacgtgctaagaacgtgaagattaatgtcatgatactcaatactatgattttttgcaatgtt

SEQ ID NO: 3028 - DNA, 501 bp, Triticum aestivum; identical to SEQ ID NO: 3027
  source 1..501: mol_type = genomic DNA

SEQ ID NO: 3029 - DNA, 618 bp, Triticum aestivum
  source 1..618: mol_type = genomic DNA
atgacaggaagatgggacccacacactctcggctgtgcaactccaaactctcttcgctgcgtacgaacacggcggccgttccggacgccgcccagacgaagtctggtctctgactccgccattccttttctcctgacctccgcacctcgccgatgtcccgcctccgccgctcctccgccacgccgatctccagcctccacctcctccgccacatctcctcctccacctccacccccacccccacgtcgccaacctcacgctcctggtcaccccatgccgcctttgccgcggccacgcagcgtgtccgtgccgggacactcaggccggaagacgcacacaacatgttcgacgaattgcttcggcaggccatcccggtccctgaacggcttccttgccgtcctcgcccgtgtgcccgcctccggcgtctgcatcagagatggccctgccctcgcagtgtctctcttcaaccgtgtgtgcagagaggaagctggcccgcaggtggcgaggctcacagtttgcacctacaacattctcatggactgctgctgccgtgcgcgtcgcccggagctagggcttgccttattccgccgcttcctcaggaagggcctgaagacagac

SEQ ID NO: 3030 - DNA, 618 bp, Triticum aestivum; identical to SEQ ID NO: 3029
  source 1..618: mol_type = genomic DNA

SEQ ID NO: 3031 - DNA, 618 bp, Triticum aestivum; identical to SEQ ID NO: 3029
  source 1..618: mol_type = genomic DNA

SEQ ID NO: 3032 - DNA, 684 bp, Triticum aestivum
  source 1..684: mol_type = genomic DNA
atggtgagcatcggcgagcatgcttgtcctcctaactctgctttccttcttcctaatcccaattcatgcccaggttgcgccggtgcggtggggggcgagcggcaccggcgtcctctgggtcctctgccattaccagattcttccagatccataggtggagctatgagccgccgcgccgtccccgctggcaggcgcatcttggagcagaacatcaagtcccggtaccgggctggagccattggcaccgacgatgcactccacctgtttgacgaattgctccaggttgcctggccctcctcgatcgccgccatcaactgcctcctcattgtcgtcggccgtgattgccctgcgctcgctgtctccctcttcaaccacatcgcaagagccaaggtggcgccccacaatatcacctacggcattctagtcgactgctgcagccgtgctggccgttggaccttggcttcgctgccatgggccacatcgttaagacgggatttgcggcaggatccgttgtctctttcagccacctgctcagggccgtctgtgcggagaagaagaccagctacggaatggacatcgtgctccgaattatgcctgagcttaactgcataccggatgtttactcctacaacattcttttcaagggcctctgcaacgagaagagaagccaagaggctctcgagc

SEQ ID NO: 3033 - DNA, 684 bp, Triticum aestivum; identical to SEQ ID NO: 3032
  source 1..684: mol_type = genomic DNA

SEQ ID NO: 3034 - DNA, 684 bp, Triticum aestivum; identical to SEQ ID NO: 3032
  source 1..684: mol_type = genomic DNA

SEQ ID NO: 3035 - DNA, 660 bp, Triticum aestivum
  source 1..660: mol_type = genomic DNA
atgatttctactgatataaaaccggacacggttgtttatcactccctaattcagggtttctgcacacatggcgatttggtgaaagcaaaggagttggtttatgaaatgataaacaaagacattcctcctcctactattgtgctcttcagttcaataataaatagtctatgcaaagaaggaagggttacagatgcacaagatatcttcaacttggttattgaaataggtgagagtcctgatgtctttgcttttacttcactacttgacggatattgcctagtcggcaaaatggagaaagcatcacaagtgtttgatgcaatggtatcagctggcattgagcctaatgcatccacctacagcgtaatgataacaaatcttttgaaacaaggattagtggaagaagctgaaagtatgttctcatcaatggagaagagcggttgtgctccggactctcctcttatgaatgatatcatcagaatattattggaaaaaggtgaaattgttaaggctggagattatatgtctaaagttgatggcaggagcatctcacttgaagctacaactacttcattgttgaaatgtctcttttcaagcaaagggaaatatcgggaacaaataaatttgctccctgtaaagtaccagtttttcaatggagccagt

SEQ ID NO: 3036 - DNA, 660 bp, Triticum aestivum; identical to SEQ ID NO: 3035
  source 1..660: mol_type = genomic DNA

SEQ ID NO: 3037 - DNA, 450 bp, Triticum aestivum
  source 1..450: mol_type = genomic DNA
atgggatctggggtcctcccggtcgcccacacggggggcggctcgggagggggaactagtatatctctgattttgtcgtggcttttatgcactttaccacatttgtatatgtattggcctttgaccctcggtaaagcttacttgctcacttatccaacaattggcacgggagtacaaccgaacacagttgtttatcactccctagttcagggcttatgtacacatggtgatttggcgaaagcggaggagttagtttctgaaatgatgaataaaggtattgctcgtccaaacaaatcgttagcttcttcctttttgtatcattactccataagtggaagcattaggcgagttggtgccaaccctgcgtatatccgtgtatctatttgccagcatatatccgtgtgtgacaaccctgcggagacaatccgttgcagttgtcatccttctttt

SEQ ID NO: 3038 - DNA, 450 bp, Triticum aestivum; identical to SEQ ID NO: 3037
  source 1..450: mol_type = genomic DNA

SEQ ID NO: 3039 - DNA, 450 bp, Triticum aestivum; identical to SEQ ID NO: 3037
  source 1..450: mol_type = genomic DNA

SEQ ID NO: 3040 - DNA, 672 bp, Triticum aestivum
  source 1..672: mol_type = genomic DNA
atggttcataatggtgtccaaccagatgctgtgacatataatagcttgatccaaggatattcaactctgggacagttgaaagaactcgttaggttgttgaaagtgatgagaagccaaggtgttctaccagatgttgttacctacaactcactcatgacctgcctttgcaagaatggaagattcaaggaagctgtagaaattttttattccatggctgtgaagggccaaaaacctaatgtcgtctcatactctataatgctccatgggtacgctatacaaggatcccttgttgaaatgattgacctctgtgagctgatggcaagagatggagttgtacccgacctccattgtttcaacatactgattagtgcatatgctaagtatggaaggatggatgtggctatgcttttcttcgaagacatgttgaagaaggggttgaaccctaatgaatttatttatttaactgtcatatctgcattttgcaagatgggcaggatggatgatgctctggaaaaattcaatgagatgattgataggggagtaccacttgacacaaaaatttacgtgtgcatgattgagggttatttgaatcatggtgaatctgtgaaagccgaggaatttattaccaaaatgaagagcagggatattcgtcatgggccgcggaagggtaat

SEQ ID NO: 3041 - DNA, 615 bp, Triticum aestivum
  source 1..615: mol_type = genomic DNA
atgtctcgcctccgcctccgcctcccccgcggcagctcctcctccaccacagtgatcccccgcctccgactactccgccgctgctcctcctccacctccacctcgccgccctcacgctcctggtctccccgagacgcctttgccgcggccacgcagcgtgtccgcgctgggacgctcaggccggaagacgcacacaacctgttcgacgaattgcttcggcaggccaccccggtccccgagcgctccctgaacggcttccttgccgccctcgcccgtgcgcccgtgtccggcgcctgcatcagagatggctccgcccttgcagtgtctctcttcaaccgtgtgtgcagagaggaagccggcgcgcaggtggcggcgctcacaggctgcacctacagcatcctcatggactgctgctgccgtgcgcgtcgcccggacctggggcttgccttattcggccgcttcctcaagaaaggcctgaagacagaccagattgtcgccagcaccttcctcaagtgcctctgctacgcaaaacggactgatgaggctgtgaacgtggtacttcataggatgtccgagctcggctgtgtgcctaatgccttatcgacctgctccaga

SEQ ID NO: 3042 - DNA, 615 bp, Triticum aestivum; identical to SEQ ID NO: 3041
  source 1..615: mol_type = genomic DNA

SEQ ID NO: 3043 - DNA, 615 bp, Triticum aestivum; identical to SEQ ID NO: 3041
  source 1..615: mol_type = genomic DNA

SEQ ID NO: 3044 - DNA, 615 bp, Triticum aestivum; identical to SEQ ID NO: 3041
  source 1..615: mol_type = genomic DNA

SEQ ID NO: 3045 - DNA, 588 bp, Triticum aestivum
  source 1..588: mol_type = genomic DNA
atgtttcatcagatgatcaaaagtggaataacagtgcccgtttccatatacactataattcttagaggactttgtaaaaataattgcgctggcgaagcaatcaccatgttccaggaattacgtgcaatgaatgtgaagtttgatatcataacactcaataccatgattaatgccatgtacaaggttcagagaagagaagaagctaaaggtttgtttgctgcaatatcagccagtgggttgatgcctgatgcttatacttacaacgtaatgataaacaatcttctaaaagaaggatcagtggaagaagttgacaatatgttttcattgatggagaagagtggttgtgctcccagctctcatcttgtaaatgatatcatcagaaggttgttggaaaaaggtgagattgccaaggctggaaattatttgtctaaagttgatgggaagatcatctcacttgaagattcaaccatttcattgttgtcgtctcttttttcaagcaaagggaaatatcgggagaacatcaagttacttcctgcaaattatcactttttagatggatttagtggcattgcacatgagactaactcc

SEQ ID NO: 3046 - DNA, 588 bp, Triticum aestivum; identical to SEQ ID NO: 3045
  source 1..588: mol_type = genomic DNA

SEQ ID NO: 3047 - DNA, 588 bp, Triticum aestivum; identical to SEQ ID NO: 3045
  source 1..588: mol_type = genomic DNA

SEQ ID NO: 3048 - DNA, 588 bp, Triticum aestivum; identical to SEQ ID NO: 3045
  source 1..588: mol_type = genomic DNA

SEQ ID NO: 3049 - DNA, 588 bp, Triticum aestivum; identical to SEQ ID NO: 3045
  source 1..588: mol_type = genomic DNA

SEQ ID NO: 3050 - DNA, 588 bp, Triticum aestivum; identical to SEQ ID NO: 3045
  source 1..588: mol_type = genomic DNA

SEQ ID NO: 3051 - DNA, 561 bp, Triticum aestivum
  source 1..561: mol_type = genomic DNA
atggttgaatctggagtaagtgtgtgcattgatacatattcgatagttcttggtggactttgtagaaataattgtagcggcgaagcaatcatgctattccagaaattaagcacaatggatgtgaaattcaatattataattgtcaatataatgattgatgccttctacaaggttcagcgaaaccaagaagccaaggatttgtttgctgcagtatcagcgaatggtttggtagctaatgtctttacctacaccataatgatgaaaaatcttataaaagaagggtcagtggaagaagctgacgatctctttttatcaatggagaagagcggctgtactgctgactcttatatgttaaatcttatcgtcagaatgttacttgaaaaaggagagctagtcaaggctgggaattatatgtctaaagttgatgcaaagagctactcacttgaagctgaaaccgtttcgctgcttatctctctcttttcagggaaagggaaatatagagaacacataggattgctccctacaaagtatcagtttcgtgaagaagcggccgcagttgaa

SEQ ID NO: 3052 - DNA, 636 bp, Triticum aestivum
  source 1..636: mol_type = genomic DNA
atgtcacgccgctataccatcacactgatctcccgcctccgagtcccccgccgctgctcctcctccacctccatctcgccgccctcacgctcctggtctccccgcgacgcctttgccgcggccacagagcgcgtgcgcgccggcacgctcagcccggaagatgcacacaacctgttcgatgaattgctgcggcagggcactccggtccccgagcgctccctgaacggcttccttgccgccctcacccgtgctacgtcctccaatgcctgcatcaaagatggccccgccctcgcccttgctctcttcacccgagggtgcagagaagaagccggcccgcaggtggcggtgcccaccgtttggacctacaacatcctcatggactgctgctgccgcgcgcgtcgcccagacctagggctcgccttattcgggtgtatcctcaggacggggttgaagatagaccaaatcaccgccaacaccctcctcaagtgcctctgctatgcgaaacggacagaagaggctgtgtacgtgctgcttcatagtatgtccaagctcggatgtgtgcctgatgccttcgcatacaacatagttcttaagagcttatgtgtgttaggaaagcaacttgtattcccatggcca

SEQ ID NO: 3053 - DNA, 636 bp, Triticum aestivum; identical to SEQ ID NO: 3052
  source 1..636: mol_type = genomic DNA

SEQ ID NO: 3054 - DNA, 636 bp, Triticum aestivum; identical to SEQ ID NO: 3052
  source 1..636: mol_type = genomic DNA

SEQ ID NO: 3055 - DNA, 636 bp, Triticum aestivum; identical to SEQ ID NO: 3052
  source 1..636: mol_type = genomic DNA

SEQ ID NO: 3056 - DNA, 633 bp, Triticum aestivum
  source 1..633: mol_type = genomic DNA
atgtcacgccgctataccatcacactgatctcccgcctccgagtcccccgccgctgctcctcctccacctccatctcgccgccctcacgctcctggtctccccgcgacgcctttgccgcggccacagagcgcgtgcgcgccggcacgctcagcccggaagatgcacacaacctgttcgatgaattgctgcggcagggcactccggtccccgagcgctccctgaacggcttccttgccgccctcacccgtgctacgtcctccaatgcctgcatcaaagatggccccgccctcgcccttgctctcttcacccgagggtgcagagaagaagccggcccgcaggtggcggtgcccaccgtttggacctacaacatcctcatggactgctgctgccgcgcgcgtcgcccagacctagggctcgccttattcgggtgtatcctcaggacggggttgaagatagaccaaatcaccgccaacaccctcctcaagtgcctctgctatgcgaaacggacagaagaggctgtgtacgtgctgcttcatagtatgtccaagctcggatgtgtgcctgatgccttcgcatacaacatagttcttaagagcttatgtgtgttaggaaaacttgtattcccatggcca

SEQ ID NO: 3057 - DNA, 633 bp, Triticum aestivum; identical to SEQ ID NO: 3056
  source 1..633: mol_type = genomic DNA

SEQ ID NO: 3058 - DNA, 669 bp, Triticum aestivum
  source 1..669: mol_type = genomic DNA
atgtcgcgcctccagccccgctctttctccagctccgcctcctcacgcgccaacgagctgctagacgaattcaaatatcatctgggctccgggacgctctggccggagctcgcgcaccaactgttggacgaattgcagcgccaacccgtcccggtttcagcgcgcgcactaaatggcttgtttgctgccctcgcggatgcgccgccctcggccaactgcacagatggccctgccctcgccatcaatctcttcaaccgccaccggatatcacctgacatttacacctacaacatactaattgagtgctgccaccgagcatgccgcccagaccttggacctgccttcttcggccgcctcctcaagacaggcgtcacaatgagtgtcattacctacagcagctatggcgaaagctttggggtggatcctctcccttccgcctcctcctcgagctatggcgaaagcttttgttcccctggtctgggcgtcgacggcaccctggtgtcgtgctccttcttgaaggcggcggctgggaacagctcttggtggcggggctgctggtggcgtggtggcttcggccttctacttggtgctgcgccttgcttcgcgggaccagcggacggtttctttggtggagcggtgctgcatccattcattgatggcgacggatct

SEQ ID NO: 3059 - DNA, 669 bp, Triticum aestivum; identical to SEQ ID NO: 3058
  source 1..669: mol_type = genomic DNA

SEQ ID NO: 3060 - DNA, 669 bp, Triticum aestivum; identical to SEQ ID NO: 3058
  source 1..669: mol_type = genomic DNA

SEQ ID NO: 3061 - DNA, 669 bp, Triticum aestivum
  source 1..669: mol_type = genomic DNA
atgtcgcgcctccagccccgctctttctccagctccgcctcctcacgcgccaacgagctgctagacgaattcaaatatcatctgggctccgggacgctctggccggagctcgcgcaccaactgttggacgaattgcagcgccaacccgtcccggtttcagcgcgcgcactaaatggcttgtttgctgccctcgcggatgcgccgccctcggccaactgcacagatggccctgccctcgccatcaatctcttcaaccgccaccggatatcacctgacatttacacctacaacatactaattgagtgctgccaccgagcatgccgcccagaccttggacctgccttcttcggccgcctcctcaagacaggcgtcacaatgagtgtcattacctacagcagctatggcgaaagctttggggtggatcctctcccttccgcctcctcctcgagctatggcgaaagcttttgttcccctggtctggacgtcgacggcaccctggtgtcgtgctccttcttgaaggcggcggcggggaacagctcttggtggcggggctgctggtggcgtggtggcttcggccttctacttggtgctgcgccttgcttcgcgggaccagcggacggtttctttggtggagcggtgctgcatccattcattgatggcgacggatct

SEQ ID NO: 3062 - DNA, 267 bp, Triticum aestivum
  source 1..267: mol_type = genomic DNA
atgaactgctgctgccgcgtgcgtcgtcccgacctagggcttgcctacttcggccgcctcctaaggaccggcctcaagacaaatgaggttgtcgccagcaccgtcctcaagtgcctttgcttcgcaaaacggacagacgaagctgtggacgtgctgcttcataggacgtctgtcctcggctgtgtgcctaattccttctcatacaacatagttctaaagagcttatgtgagacagcaggagccagcaagcgctcggcctgctcgagg

SEQ ID NO: 3063 - DNA, 660 bp, Triticum aestivum
  source 1..660: mol_type = genomic DNA
atgccacgcgtccgacccggctcctcctccggcaccgtctcctcacacgccaaccagctgctaaacaagctcaaggatcatgtcggctctgggacactccagccggagcgcgcacaccaactgtttgacaaattgctgcgccaagctgttcccatatctgcgtgcgcactcaatggcttatttgccgccctcgcgcgtgcgctgccctccgctgcctgcaccgacggccctgctctagccattgctctcttcaaccgcatggctcgagagggccgctgggtgatagcgcccaacatgtacacctacaccatactaattgactgcagctgccgctcgcgccgccctgacctagggcccgccttcttcggccgcctcctcaagacaggcatcacggcggacgtctgcaccttcagcagcttattcaagtgcctctgtgacatgaagcggatagacgaggctgtgggagtgctgcttcacaggatgcccggagacatgcctgatgtcatctcctactcaacaatcctcaagggcttctgcaacgaggggaggagccagcttgcacttgatctgctccagatgatggtcaaaaaaggagctggccagtcacccgacgtggtatcatacaacatggtaatcaatggcttctttaaggaggtgaag

SEQ ID NO: 3064 - DNA, 660 bp, Triticum aestivum; identical to SEQ ID NO: 3063
  source 1..660: mol_type = genomic DNA

SEQ ID NO: 3065 - DNA, 660 bp, Triticum aestivum; identical to SEQ ID NO: 3063
  source 1..660: mol_type = genomic DNA

SEQ ID NO: 3066 - DNA, 660 bp, Triticum aestivum; identical to SEQ ID NO: 3063
  source 1..660: mol_type = genomic DNA

SEQ ID NO: 3067 - DNA, 660 bp, Triticum aestivum; identical to SEQ ID NO: 3063
  source 1..660: mol_type = genomic DNA

SEQ ID NO: 3068 - DNA, 660 bp, Triticum aestivum; identical to SEQ ID NO: 3063
  source 1..660: mol_type = genomic DNA

SEQ ID NO: 3069 - DNA, 588 bp, Triticum aestivum
  source 1..588: mol_type = genomic DNA
atgacacgcctctactccaccacggcgtgcgcgcgccgcgttcgcatccgctgctgctgccgcctctcctccaccacctcgccaccctcgcgcacctggtctccccgcgccgccttcgccgtggccacagagcacgtccgagccggcacgctcagccgaccagacgcacatcgcctgttcggcgaattgctacggcgggacaccccggtccccagccgctccctgaacggcctccttcccgtgctcgcccgctccacgtcctccgcgtacgtcccgcgtcacagatgggcccgccctcgccgtcgccctcttcaaccgcatgcgccgagcggaagccggcccgcttgtggcgcgtcccgcagtgtacacctcctcatggactgctgctgccgcgcgcgtcgcccggaccttgggctcgccttcctcggccgtctcctcaggacgggcctcaagacagaccaggtcgtcgccaacaacttcctcaagtgcctctgctacgccaagcggaccgacgaggacgtcgacgtgctgcttcataggatgcccgacctcggctgtgtgcctaatgccgtctcatgcaacatacag

SEQ ID NO: 3070 - DNA, 627 bp, Triticum aestivum
  source 1..627: mol_type = genomic DNA
atgtctagaaatggtgttgaaccaactatgataacttacaatatacagatggattatctatgcaagagcggaagatgcatagaagctaggaagatgtttgattccatggtcagtttgggacaaaaaccgactgttactacctacaacattctgcttcatggatatgctatggaaagatcttttcatgatatgaattgtctcattgagttgatggattataatggtattaaaccagatcattatggctacaataaactcatatcttcatctgctaaaaaagaaatggttggtgaggtattgcatatatttacaaaaatgcggcagcaaggattgaaccctaatgttgtgaactatggaacggtaataaacttgctttctagtattggccgaatggatgatgctatgtcccaattcaatcaaatgataactgaagggttagctcctgatatcatagtttcaactcccttattagtggtttctgttcttgtggcaaatgggagaaggttcatgaactattttctcagatgttggatcgcggcatctgtccagacacagtgttcttcaacactgttatggatcacctttgcaaaaatggaagggttatggaagcccaagatgtgttcgacc

SEQ ID NO: 3071 - DNA, 627 bp, Triticum aestivum; identical to SEQ ID NO: 3070
  source 1..627: mol_type = genomic DNA

SEQ ID NO: 3072 - DNA, 627 bp, Triticum aestivum; identical to SEQ ID NO: 3070
  source 1..627: mol_type = genomic DNA

SEQ ID NO: 3073 - DNA, 624 bp, Triticum aestivum
  source 1..624: mol_type = genomic DNA
atgtacaaaattatacttgatgggctgttttgctctgggagaacagtttgtgcaaaggaaaaattcaatacgatgactgaaagtggcataccagtgggcgttgacacatacaacatagttcttagtggactttgtagaaacaattgcactgatgaagcaatagagctgttcaagaaactacgtgcaacgaacgtgaagattgatgtcataacattcaataccatgatttctgcaatgtttaaaactaggagaattgaagaggccaaggatttgtttgctactatatcagccattgggttggtgccttctgttgtgacttacagtgtaatgatgacgaatttcataaaagaagggttgctggcagaggctgatgatatgtttttaacaatggagaaggctagctgtgctcccaactccagtctgctaaatcaagtggtcagggcgttgctggaaaaaggtgcagttgtaaaggctgcaacttatctcgctaaacttgatgctaaacagctgtcagttgaagcttcaacgatttcgttaatagtatctctcttctcaagggaagggaaactaagggagcatgtagagttgcttccagtaaagtaccagcctccggagatgtccgtc

SEQ ID NO: 3074 - DNA, 642 bp, Triticum aestivum
  source 1..642: mol_type = genomic DNA
atgccacgcgcccgaccgggctcctcctccagctccgtctcctcacgcgccgaccagctgctaaataaactcaaggatcatctgggccctaggacgctccagccggagcgcgcacaccaactgttcgacaaattgctgcgccaaaccgttccggtatcagcgttcgcactcaatggcttatttgccgtccttgcgcgtgcactgccctccgctgcctgcaccgatggccctgctctagccattgctctcttcaaccgaatgaaccgagagggccaccaggtaatagcgcccaccaatcacgcctacaacatactaattgactgctgctgccgctcgcgcttcccgggcctagggcctgccttctttggccgcctcctcaagacaggcatcaaggcgaacatcatcaccttccacagcctattcaagtgccagtgtgacatcaagcagatggaggaggccctcaacaggctgctctacaggatacctgagctgcctgatagcatctcctactcaataattattaagagcttatgtgacaatgggaggagccaatgtgcacttgacctgctccggatgaaggcgaaaaagggagctgaccactaccctgaagtggtggcatacaacagggtggagccaatggct

SEQ ID NO: 3075 - DNA, 642 bp, Triticum aestivum
  source 1..642: mol_type = genomic DNA
atgccacgcgcccgaccgggctcctcctccagctccgtctcctcacgcgccgaccagctgctaaataaactcaaggatcatctgggccctaggacgctccagccggagcgcgcacaccaactgttcgacaaattgctgcgccaaaccgttccggtatcagcgttcgcactcaatggcttatttgccgtccttgcgcgtgcactgccctccgctgcctgcaccgatggccctgctctagccattgctctcttcaaccgaatgaaccgagagggccaccaggtaatagcgcccaccaatcacgcctacaacatactaattgactgctgctgccgctcgcgcttcccgggcctagggcctgccttctttggccgcctcctcaagacaggcatcaaggcgaacatcatcaccttccacagcctattcaagtgccagtgtgacatcaagcagatggaggaggccctcaacaggctgctctacaggatacctgagctgcctgatagcatctcctactcaataattattaagagcttatgtgacaatgggaggagccaatgtgcacttgacctgctccggatgaaggcgaaaaagggagctgaccactaccctgaagtggtggcatacaacagggaggagccaatggct

SEQ ID NO: 3076 - DNA, 642 bp, Triticum aestivum; identical to SEQ ID NO: 3075
  source 1..642: mol_type = genomic DNA

SEQ ID NO: 3077 - DNA, 642 bp, Triticum aestivum; identical to SEQ ID NO: 3075
  source 1..642: mol_type = genomic DNA

SEQ ID NO: 3078 - DNA, 642 bp, Triticum aestivum; identical to SEQ ID NO: 3075
  source 1..642: mol_type = genomic DNA

SEQ ID NO: 3079 - DNA, 642 bp, Triticum aestivum; identical to SEQ ID NO: 3075
  source 1..642: mol_type = genomic DNA

SEQ ID NO: 3080 - DNA, 567 bp, Triticum aestivum
  source 1..567: mol_type = genomic DNA
atgtcgccgctccgcctccggccccgcctccggccccgcctccatgcccgccgctcctactccacctcgcatcccccacgcagccagggctgggatccccacgccgccttcgctgctgccacggagcgcgcgcgatctggcaacctcacctcgaaggacgcacaccacctgttcgaccaattgctcctgcaggctaatccggtcaacatgcgccctccgaacgatcttctcaccgccctggctcgcgcgcctgcgtccgcagcctgcagcaacggccccgccctcgccgtcgccctcttcagccgtttgtcccaaggtgcccgccaacgggtggtgcagccaacggcctgcacccacggcatcctcatggactgctgctgccgcgcgaaccgccaggatctggcgctcgccttcttcggccgtctcctcaggacgggactgaaggcaggcgtcatagaagtcaacactcttctcaagggactctgccgcgcaaagcgggctgatgaggctctggacattctgcttcacaggatgcctgagcttggctgcacccctgacgtggtggcg

SEQ ID NO: 3081 - DNA, 567 bp, Triticum aestivum; identical to SEQ ID NO: 3080
  source 1..567: mol_type = genomic DNA

SEQ ID NO: 3082 - DNA, 534 bp, Triticum aestivum
  source 1..534: mol_type = genomic DNA
atgattgatacaggagtacgacagggcacatctgtttatggttctctaatccagggtttttgtacacacggcgatttggtgaaaggaaaggaattggttactgaaatgatgaacaaaggtataccacctcctgatattaagttcttccattcaatcatgcagaacctatgcacagaaggaagggtaatagaagcacgagatatccttgacttgatagcgcagataggtatgaggcctgatgtttgcacatttaatttactgatcggtggatacttcctagtccgcaagatagagcatacatcaaaaatatttgatgatatggtgtcatatggtttaaaaccttgtaatattacatatggtatacttattaatggctattgcaaaaatggaaggattgatcacgggctgattctgttcaaagatatgttgcgcaagggacttaaaccaacaacttttaattacagcccctcgcccctcgcgtcgcccccgtggaattcactcaattccaaaatattttatattttatatttgtac

SEQ ID NO: 3083 - DNA, 576 bp, Triticum aestivum
  source 1..576: mol_type = genomic DNA
atggacaaggcagaggtggtccttcgacaaatggttggtaatggtgttcgaccggatattttcacatatactagcctgatccatggatattccatttcgggccagtttgaagaggtcgttaggttgttggaaaaaatgagaagtcaaggtgtcaaaccaactgtttttacttgcaacacagtcatggactacctttgcaagcatggaagaatcaaagaagctgcagaatttttttattccatggctgagaagggtcataaacctaatacagtctcatacgctattatgcttcatgggtacgctaaagaaggatcccttgttgatatgactaatctctgtgagctgatggctggagatggtatcatacccaacatctgtattttcaacatattgattagtgcatatgctaagtgtggaattatggatgtggctatgcttttcttcgaagacatgttgaagcagggagtgaaccctgatgaagtcacgtatttagctatgatagctgggtattgcagtatgggcagtatagtattagtaagtctgacgtgtgctaagatttcagaatataacagaagt

SEQ ID NO: 3084 - DNA, 576 bp, Triticum aestivum; identical to SEQ ID NO: 3083
  source 1..576: mol_type = genomic DNA

SEQ ID NO: 3085 - DNA, 576 bp, Triticum aestivum; identical to SEQ ID NO: 3083
  source 1..576: mol_type = genomic DNA

SEQ ID NO: 3086 - DNA, 576 bp, Triticum aestivum; identical to SEQ ID NO: 3083
  source 1..576: mol_type = genomic DNA

SEQ ID NO: 3087 - DNA, 576 bp, Triticum aestivum; identical to SEQ ID NO: 3083
  source 1..576: mol_type = genomic DNA

SEQ ID NO: 3088 - DNA, 576 bp, Triticum aestivum; identical to SEQ ID NO: 3083
  source 1..576: mol_type = genomic DNA

SEQ ID NO: 3089 - DNA, 555 bp, Triticum aestivum
  source 1..555: mol_type = genomic DNA
atgtcgccactgcgcctccgcctccgcctgcacgcccgccactcctcctccgcctcgcaaccctcacgccgccagggatgggatccccacgccgccttcgccgccgccacggagtgcgcgcgctccggcaacctcaccccggaggacgcacaccacctgttcaacgaattgctgcggcagggcaatcctgtcctggggcgccccctcaacaaccttctcgccgccctcgcccgcgcgccggcgtccagcgcctgcagagatggccccgcactcgcggtcgccctcttcagccgcatatcccaaggcgcccgcctaagggtgctgcacccaacggcctgcacctacggcatcctcatggactgctgctgccgcgcgaaccgccaggatctggcgctcgccttcttcggccgtctcctcaggacgggactgaaggcaggcgtcatagaagtcaacactcttctcaagggactctgccgcgcaaagcgggctgatgaggctctggacattctgcttcacaggatgcctgagcttggctgcacccctgacgtggtggcg

SEQ ID NO: 3090 - DNA, 555 bp, Triticum aestivum
  source 1..555: mol_type = genomic DNA
atgtcgccactgcgcctccgcctccgcctgcacgcccgccactcctcctccgcctcgcaaccctcacgccgccagggatgggatccccacgccgccttcgccgccgccacggagtgtgcgcgctccggcaacctcaccccggaggacgcacaccacctgttcaacgaattgctgcggcagggcaatcctgtcctggggcgccccctcaacaaccttctcgccgccctcgcccgcgcgccggcgtccagcgcctgcagagatggccccgcactcgcggtcgccctcttcagccgcatatcccaaggcgcccgcctaagggtgctgcacccaacggcctgcacctacggcatcctcatggactgctgctgccgcgcgaaccgccaggatctggcgctcgccttcttcggccgtctcctcaggacgggactgaaggcaggcgtcatagaagtcaacactcttctcaagggactctgccgcgcaaagcgggctgatgaggctctggacattctgcttcacaggatgcctgagcttggctgcacccctgacgtggtggcg

SEQ ID NO: 3091 - DNA, 555 bp, Triticum aestivum; identical to SEQ ID NO: 3090
  source 1..555: mol_type = genomic DNA

SEQ ID NO: 3092 - DNA, 555 bp, Triticum aestivum; identical to SEQ ID NO: 3089
  source 1..555: mol_type = genomic DNA

SEQ ID NO: 3093 - DNA, 606 bp, Triticum aestivum
  source 1..606: mol_type = genomic DNA
atgcctcgcttctcctccagcacgccaatgtcgccagcacgtctccgcctcctccgactctgcgcccgccactcctcctccacctctcatccctcacgcatctgggatccccacgccgccttcgccgccgcgacgcagcgggcgcgctctggcacgctcaccacggaggacgcacaccacctgttcgacgaattgctgcggcagggcaatcacgtccaggagcgtcccttgaataactttctggctgcccttgcccgcgcgcccgcgtccccattctgtagcgatggccccgccctggcggtcgccctcttcggccgtttgtcccgaggcgccggacgacgggtggcgcagccaaatgtcttcacctatggcgtcctaatggactgctgctgccgtgcgcgccgcctggatctagcgatcgccttcttcgcccgtctcctcaagacgggactggaggcaggccaagtcgttttcggcaccctcctcaagggactctgccatgcaaagcgctcagatgaggctctggacgtgctgcttcacaggatgcctgagctgggctgcatccctacaaagtatcagtttctggaagaagcagccacagttgaa

SEQ ID NO: 3094 - DNA, 606 bp, Triticum aestivum; identical to SEQ ID NO: 3093
  source 1..606: mol_type = genomic DNA

SEQ ID NO: 3095 - DNA, 618 bp, Triticum aestivum
  source 1..618: mol_type = genomic DNA
atgactgatctctgtgagctgatggcaagagacggtattgtaccctatctccattgtttcagcatattgattaatgcatatgctaagtgtggaatgatagatgtggctatacttttcttcaaagacatgttgaagcagggagtgaaccctgatgaagtcacatatttagctgtgatagccgggtattgcagagtgggcatgatggatgatgctatggaaaaattcaatgagatgattgatatgggagtaccacataacgcaactgtttacaggtgtatgattcagggttacttaaatcatggtgatttcttgaaagcaaaggaattgattactgaaatgaagaccaagggtatccatcctagatgcggaaaagccaaagaattgatccagggcagtagcggatcagtggacaacattccagtggctaggggtctacactacaccaaaattagtatgatggacaaacattgcactagtaaaactaaaactagtaaattgtttgtgggggccatgacccccatgaccccacccctagatccgccactgacccagggtacctcatgtcacaactcttttacaggtgcatgttccagggttgttttcatcatggtaattaca

SEQ ID NO: 3096 - DNA, 618 bp, Triticum aestivum; identical to SEQ ID NO: 3095
  source 1..618: mol_type = genomic DNA

SEQ ID NO: 3097 - DNA, 618 bp, Triticum aestivum; identical to SEQ ID NO: 3095
  source 1..618: mol_type = genomic DNA

SEQ ID NO: 3098 - DNA, 618 bp, Triticum aestivum; identical to SEQ ID NO: 3095
  source 1..618: mol_type = genomic DNA

SEQ ID NO: 3099 - DNA, 618 bp, Triticum aestivum; identical to SEQ ID NO: 3095
  source 1..618: mol_type = genomic DNA

SEQ ID NO: 3100 - DNA, 618 bp, Triticum aestivum; identical to SEQ ID NO: 3095
  source 1..618: mol_type = genomic DNA

SEQ ID NO: 3101 - DNA, 561 bp, Triticum aestivum
  source 1..561: mol_type = genomic DNA
atgttggatcgcagcatctgtcccgacagagtgttcttcaacactgatatggatcacctttgcaaaagtggaagggttatggaagcccaggatatcttcgacctgatggtacacatgggtgtgaagccttttgtccgtgattacaacacactgatacatggatactgtttagttggtaagatggatgaagggaggaagttacttgacaatatgtgctcaattggcttgaaaccggatgatttcacctatagcatactgattgatggttactctatgaagggaaggatagatgatgcattgattgttgtcagggaaatgttagacgggaaggttaaaccttctattatcactattaatattatgattggtgcattgcttaaaggtggcagaaaggaagaagccaaagatttgtttgatggtatctgggccaaaggattagtgcccaatgttgttacatatagcttaatgatacaaaaacttatagaagaaggttctctacaagagtctgatgatctattccttctatggagaagaatggatgtgctgccaactcccgtacac

SEQ ID NO: 3102 - DNA, 561 bp, Triticum aestivum; identical to SEQ ID NO: 3101
  source 1..561: mol_type = genomic DNA

SEQ ID NO: 3103 - DNA, 483 bp, Triticum aestivum
  source 1..483: mol_type = genomic DNA
atgttccaggaattaggtgcaatgaatgtgaagttcgatattataacactcaataccatgattaatgccatgtacaaggttcagagaagagaagaagctaaaggtttgtttgctgcaatatcagccagtgggttggtgcctgatgcttatacttacaacgtaatgataaacaatcttctaaaagaaggatcagtggaagaagttgacaatatgttttcattgatggagaagagtggttgtgctcccagctctcatcttgtaaatgatatcaccagaaggttgttgggaaaaggtgagattgccaaggctggaaattatttgtctaaagttgatgggaagatcatctcacttgaagattcaaccacttcattgttgtcgtctcttttttcaagcaaagggaaatatcgggagaacatcaagttacttcctgcaaattatcacgttttagatggatttagtcgcattgcacatgagaataactcc

SEQ ID NO: 3104 - DNA, 483 bp, Triticum aestivum; identical to SEQ ID NO: 3103
  source 1..483: mol_type = genomic DNA

SEQ ID NO: 3105 - DNA, 633 bp, Triticum aestivum
  source 1..633: mol_type = genomic DNA
atgataatggtatttcaccagatcattatggctacaacatactcatatctgcttatgctaaagaaaaaaatggttgatgatgtattgcatatatttacaaaaatgcggcagcaaggattgaaccctgatgttgcgaactatggagcggtaataaacttgctttctagtattggccgaatggatgatgctatgtcccaatacaatcaaatgataaatgaagggttagctcctgatatcatagttttcaactcccttattagtggtttctattcttgtggcaaatgggagaaggttcatgaactattttctgagatgttggatcgcggcatctgtcccaacacagtgttcttgaacacaattatggaccgcctttgcaaaaatgaaagggttatggaagcccaagatctcttcgacctgatggtacacatgggtgtgaagcctgatgtgtgtacttatagcacactgataggtggatacttgttcgttggtaagatggatgaagtgagcaagttacttgacaatatggtctcaattggcatggaaccagatgttatcacctataacatactgatgcacctcatatacctcatatatatccatcttgtctgttatgtcccatggacatatctcatt

SEQ ID NO: 3106 - DNA, 474 bp, Triticum aestivum
  source 1..474: mol_type = genomic DNA
atggttgataatggtgttagaccggacaacgtgacatataatagcctcatccatggatattcctcttcaggccactggaaggacatggttaggttattcaaggaaatgaaaaatcggagtgttacaccagatgtgtgtacttacaacttgttgatgaactcccttcgcaagaatggaaaaaccaaagacgctgcagaaaattttgattcaatggcaatgaagggcctgaaacctgacaccatttcatatgctattatccttcatgggtatgccaccgaaggatgtttagttgatatgattaatctcttcaattcaatggcaacagactgtattctacctgactgtgatatcttcaacatactgattgatgcatatgctaaatctgggaagcttgataaggctatgcttatgtttaaagagatgcagaaacaaggagtgagtccagaactccagatgcagtcacatattcaaccg

SEQ ID NO: 3107 - DNA, 589 bp, Triticum aestivum
  source 1..589: mol_type = genomic DNA
atgagatacacagtgagttcattcatccaactcgcgcgccaactgttcgacgaaatgctgcgccaaccagtcccaatatcggcgcgtgcactcaacggcttatttgctgcacttgcgcgtgcgccgccttcaaccgcctgcactgatggccctgcgctcgccgtcgatctcttcaaccatatggcccgagcaggccgccgctggatgacaggacccaccgtccacacttacaacatactaattgactgctgccaccgagcatgccgcccagacctagggcctgccttctttggctgcctcctcaagacaggcatcataatgagcgccattacctacagcagcctattcaagtgcctctgtgacatgaggcgcacaaaggaggctctgaacgtgctgctccataggatgcccgataacctgcctaatgtcatctcctactcagtgattctcaagagtttttgcgacagtgggaggagccagcttgcgcttgacctgctccgggtgatggccaaaaaaggtggtgaccactctcccgacgtgatggcatacaacatggtaagcaaagcatgcgatctattccacgaaatga

SEQ ID NO: 3108 - DNA, 978 bp, Triticum aestivum
  source 1..978: mol_type = genomic DNA
gtgcagcgtgacccggtcgtgcccctctctagagataatgagcattgcatgtctaagttataaaaaattaccacatattttttttgtcacacttgtttgaagtgcagtttatctatctttatacatatatttaaactttactctacgaataatataatctatagtactacaataatatcagtgttttagagaatcatataaatgaacagttagacatggtctaaaggacaattgagtattttgacaacaggactctacagttttatctttttagtgtgcatgtgttctcctttttttttgcaaatagcttcacctatataatacttcatccattttattagtacatccatttagggtttagggttaatggtttttatagactaatttttttagtacatctattttattctattttagcctctaaattaagaaaactaaaactctattttagtttttttatttaataatttagatataaaatagaataaaataaagtgactaaaaattaaacaaataccctttaagaaattaaaaaaactaaggaaacatttttcttgtttcgagtagataatgccagcctgttaaacgccgtcgacgagtctaacggacaccaaccagcgaaccagcagcgtcgcgtcgggccaagcgaagcagacggcacggcatctctgtcgctgcctctggacccctctcgagagttccgctccaccgttggacttgctccgctgtcggcatccagaaattgcgtggcggagcggcagacgtgagccggcacggcaggcggcctcctcctcctctcacggcaccggcagctacgggggattcctttcccaccgctccttcgctttcccttcctcgcccgccgtaataaatagacaccccctccacaccctctttccccaacctcgtgttgttcggagcgcacacacacacaaccagatctcccccaaatccacccgtcggcacctccgcttcaag

SEQ ID NO: 3109 - DNA, 1014 bp, Triticum aestivum
  source 1..1014: mol_type = genomic DNA
gtacgccgctcgtcctccccccccccccctctctaccttctctagatcggcgttccggtccatggttagggcccggtagttctacttctgttcatgtttgtgttagatccgtgtttgtgttagatccgtgctgctagcgttcgtacacggatgcgacctgtacgtcagacacgttctgattgctaacttgccagtgtttctctttggggaatcctgggatggctctagccgttccgcagacgggatcgatttcatgattttttttgtttcgttgcatagggtttggtttgcccttttcctttatttcaatatatgccgtgcacttgtttgtcgggtcatcttttcatgcttttttttgtcttggttgtgatgatgtggtctggttgggcggtcgttctagatcggagtagaattaattctgtttcaaactacctggtggatttattaattttggatctgtatgtgtgtgccatacatattcatagttacgaattgaagatgatggatggaaatatcgatctaggataggtatacatgttgatgcgggttttactgatgcatatacagagatgctttttgttcgcttggttgtgatgatgtggtgtggttgggcggtcgttcattcgttctagatcggagtagaatactgtttcaaactacctggtgtatttattaattttggaactgtatgtgtgtgtcatacatcttcatagttacgagtttaagatggatggaaatatcgatctaggataggtatacatgttgatgtgggttttactgatgcatatacatgatggcatatgcagcatctattcatatgctctaaccttgagtacctatctattataataaacaagtatgttttataattattttgatcttgatatacttggatgatggcatatgcagcagctatatgtggatttttttagccctgccttcatacgctatttatttgcttggtactgtttcttttgtcgatgctcaccctgttgtttggtgttacttctgcag

SEQ ID NO: 3110 - DNA, 450 bp, Triticum aestivum
  source 1..450: mol_type = genomic DNA
gcatccatggacgtggattgaattgaaggtgtactactgctgtgctggtccgtggatcgtggctgtcatgcatggtttgctgtgtcttctacgatatgtacttccctttgttccgtatatgtacatcttcctcgtttggttcatgtattttcctttgaataataataaataaatcgggctttccatatcggatgcttttatatctgtgtgtatggagattgtggtatatggtttcatctcaagttgtttacgtcaagaactaaagatatttcctcaaaaaaaaagaactaaagatataatcaatgtcattaacataactcatttccatgaggagaggacgaaggacgaagtcataataagtagattggttgatattttataatcattcaaaactgcaggggttataagatcttcattttgtagaagttttagatcttccgaggggttctc

SEQ ID NO: 3111 - DNA, 864 bp, Triticum aestivum
  source 1..864: mol_type = genomic DNA
tgatgcaccggactagacagataaacattggcatggtttggagctctctctcaatgatgtcgacatgagttctgttccatgtgctcacaagatcgagctgagtgttcgtgttaccatagcgttttggcccgatgcatgcggctgctgggcgtgcatcctatggacatcgcccctaatctgcatgccatttccatgctcaaggttcgcatcctctcttcctcttaataatatgccagggctgttactaccccagggccttttcctctttattctccttttactttttgaggtcttcatgtttatagttagatgcctgtcattatacaccagaaaaactgtaagagttcctgaactagataccgtcataccgaacaagataacaacattaaacattcttaatacattttcttggtgcagatgtttatgtgatgacgtatgatcttaatctggaaagatctcttgtaggcatgccttgatgttgtttttccttatgttcgctagagggagcaatgtggccatccagttggcgaatttcacgttttcttctccactgatagcacaacctaagttgcacttgttatgaagatctttaattcattccatatgaatttgtcgcatatgttgttcctttttatgaattatatttatttggaattcgatcaagtaccgtagaatgtcgcccatctttggacagataactgttgacgtctcgaattttgcatttgtgtctccaagcactcttattttatcttccttgggcaaagttcttgttacattatgcacttgtgtcatccaagcactctcattttatcttccttgggaaaagttcttgctacattatgcacttgtgtcatccaagcagtc

SEQ ID NO: 3112 - DNA, 1000 bp, Triticum aestivum
  source 1..1000: mol_type = genomic DNA
tgcaaagagctactcacttgaagctaaaactgtttcgctgctgatctccctcttttcagggaaagggaagtatagagaacacataaaattgctccctatgaagtatcagtttctcgaagaagcagccacagttgaatagtttgatacatgatctctgaactcaactcctagaagttaacttggattgttgcttgccatgggtccttatgcttgtacaacaaatgcattttctgtttggtaaatagaaagccagtcctaaattctgtcactttttgttaagttcgtgatgcgctgaaataactatttttttccgttagttattgtgagtagtatctgaaatttcctatatttttgtttctcaggcttatcacaatctcagtattatagtttctgcagttagtgaaagaagatctatttctagtaacatgaaagcttccataaggcttgtgttccacttctcacttgctgttttgaggctgcttgcatacattttggtcgtttctttgccacttggtaagtataattgcaactgcataatactttttctatattgtacaattcacattcagttactggaaaacttgtgccccttgtgaggattctgagtgtctttgcttcactgcttcagatatatgatatcgtcaaatattggtaaagttttgggcacttggagatgccggacttcatcattgtcaaggcttctatctgaaaattggactactgcatccgcgaggatcctgcgggcactgactgtgctcttgatagaatgctggcaacggcatggttggccgcacagagaaggagtctacctgatgaaatgcagagagcaagactatgtccaattcagaggtgttgtgcatcaaattgattttaaatgaatacacgtgctcaggtcgaaggtgaagctgggatggcactatgttttgtcatgaaaaggtgttaaggctgaaaagggaatccattgactatgtttcattgagctctgaaggtcataaggatt

SEQ ID NO: 3113 - DNA, 2500 bp, Triticum aestivum
  source 1..2500: mol_type = genomic DNA
ggtggcggcccccctttcctgcctttggtcattcgtctccgcgcaggtcggctgctctggccggcccttggtggttgctgtagtgctgcggcaagggggtgccagatccatcggttcttcattcggatccagctcgtctcttgccttactcagggtcggtcaccccgtgaccttgcctgcggcagtgagggggtgtgcgtgctctgtgatgggccttgtgaggcgatggcgcgcttgctgcgcaggggtgtgcgggccaacttgtgtcggctgcgtgagggtgttggttgagtctgctccaagcgcaagcttgcccggctatggccggccggtggtggcggcgcctacgggtgtcgtttcccttgttgaaggcgttgttgtggagttcttcgacctactacaatctcgaatctggttcttcgggcgaaagccttgccccatctgggtcgggcaacgacgtcgtccgtacgatgttttccccctttggggcgttgctttgaaggccggttaacctttcccgtgctacctttgggttggtcgtgcatggtgtcatggttggctggtgctcaaccggtgatgcgagtggttggcgttgcgactcgtgcggcgacgaagatggtgatgtgcagagctgggtcgcggcttgtccttctgatgtcggcggttcgattcccctttgggtgcatctgtgcttgtttctcactatgacagagaagttgaagctgcatgcagcggggcccttgcagcaatgatgactccatgagggtggtttcggcagacggtgctctccgtaggttgcactggactagcttggtgcgaggcttgcaactttctcctgtgatgctcatcaacaaaatcggagctgtcggtcctcgacgcctgcggccgatcatttggcttggctgtcgaggtcatcgggtgtcgtttgttcagaggggtcttgatgggtcgtcagcgaggaaaccagagttgcctgctcgcggagaggcgatgacgatgacattgcttgcagcctcgacggtgtcctctcctcagcggtatgtgtgtggtcttgtcagtgccaggtcggccggagcgtcctattcgatgggcgtgttttaattaaccgagcaactctcttcttcttaatcaatgaaaatggcaagtcttttacctcgtttcaaaaagagttagatgcactggaggtatcgagatgtcagtttagtcctatgtcttccaaaatgcgcctttaggtcctaattctttcttaattggttcacccgaggtccttttccacgaccactcgctgaccagcccacgtgccgcattgacccacgccacgtcgacagagggtccaaccgccaggcgagaagcttcgcaaagagacaccccccctcttagtggcacccctctcctctttcacggtactttggcgacattggaggcgagtggcagaggcaaccggaggtgatctggaggcaatctgagtgggtgcccgtgaagatgccccttctatgacggccagtgagcggtcctcctccatgttaccgtgagaaccctaatcttgtcgatgctcttctcctgtagctcttctattatgccataactctgccataatcaatagttgtagtccttgatttacttcgatttgcataacggtgctacggacacggcaaaaaagacacaccaccagcggcaacatactcgccgaagttggagcttgcttcgccgcgccggtggcggtgctgacgatgctgccatgctcctcatcttcagttgtttccttgccgaggagcttgaagttccggccatggataggtttagggcacacgagagagcagatttggggaagaaataaagccagggactggggaatgagaaggtaatgttcataaggggttttctgtaaaaagaaagagcaacctaagcggcccctttgtcgacttggcgtgggtcaatgcgccacataggcaggtcaatgagcgcttgtgagaaaaaggtcctcgggtaaaccacttgcttaaagaattactccctccgtcctataatataagaacgtttttgacactcactagtgtagtgtcaaaaacgtttttatattatgggacggagggagtagtacctaaaggtgcattttggactaaataagactaaagtgacaccccgacgaaacttttaggacctcgagtgcatttaactcttaaaaaaacaaagatgctaaaaaaactaaatgcttaaaaatatatttttctatgggaatacttaaaaatactattataattttatggcttcctagtatatttctagggcttacaactaaatttatattcttggtctaaataaaattataatctgataaattatgtgatatgaatatgtcatatagccatatgagaccataatttaattttacctgcaaaaaataagtaatagtagtagtactactagataagataacttggtaaagcactagccccgtcgtctcccagttcaggatctacctacactgcacaccaaggcc

SEQ ID NO: 3114 - DNA, 2178 bp, Triticum aestivum
  source 1..2178: mol_type = genomic DNA
gtaggatgtgtgcggggtgattggaagatccaactataaatattattgatactctcttaaaagatgggatggtgatcaccttgcaataaagagttattttttcgcgaatagcaataaagagttatttgatggcaaaaaaaaatcagatgatgtgggctggcctaggatatatagatatataacacttccccttttatattagaatacttaaacatttcgtacattgcatgttgttatatagcctgcaaaaaaggctttcgcgctgctttatataaaaagcaacatagtcaaactgatgtatggtgatgagaagatcgtcttataaaacagatcatatggaaaaacaagaaaacaatagagtgcacaccctatcacaaaacaatctagactacaactagggggagacttgcaccaagggaaaacgcatgacctcgttgcgcaactcgtaccaaggtgacaccagagagagcccctaccctcccgctcctgatcgtggagcctaagcctgcttgcggacaacaaggatcgcgatggatgccaataagggctcgtgtaaaaagataaggaggaaaaacgacagcccacgcgcgaagccaaggaaacttcgatccagcatccgaacatgcctgccaattggcgacacggtgcaccgaaggtaacctaggccccatgacgacgcccacaggagggagacgacgtaaggagtcgccatcgtcaaaaccgaagagacaatcaagggttttcatccggagccctggctccaagagagggaccacatcgacggccccaagagagatgcgacacccatgtgcatcactgccactagtgtcgaagcacaaggctttcgcctagagcctcttacaggcgtcacatcgaggaaccccgagcatcagcccacccgagggaagagatatcactaccaaacaaggcctccatggttctgggagccgtcactgccgaggcaccaccgacaccgggatcaccaagcgtggcatcctttgccatccacacaaccaaaagatgtccccaccaccgctgccaaggcgcctgctgaaaagccgctctgacggtccgccaccctaggccgccgctccggcgtccaatatcccaacctcgactccacacgcgggcaccaacccccgaaaaccgcactcaccggtggtgacacggaaagcgaaactactccatgcacgacgttcagtgaacgatctctggacgacaaggaatcaaatggctggagctgtactttgtctattcatgatcggtgtgatcaatagcgtcgtccacagatcgggcaaaggccgtcgtccgcataacatcgctccatggaaaggctcttcctttccagtcccacggcacaccacgccgacaccagcaccatctgcggcggtgaccactgaccagcgaacctaactcggtcaaggagaccaaacctggctgggagcacgctaccccatctgcctccaccccacagcacgagcacgggtgtccattcaggtacaacaggggatccacatcagaacatctccaacaatttgtatgttagtttgttggtaaaatatgccatgtcatcaaccaacaccgtaacatacaacaacttcaatggattatatctagcctgcccaatagaatgtgagataataaataaggtgctctctcattctacattggagcttgtgcaaggagtgttgattcatgtacatacaaccttcttctctttcttcatttattgtatgacacatcatcaaaaattctactacaccctttccgatttataaggcatgcacgtatccctaggtttataatttgagcaatataaaataagttgtatattctaaaaattacaccattagaaagtagaaaatctgaaatttttaataatatattttttgtgacaaatagcttgttttacgttggtttatttgtcaacctagatatacgtgcaagccctataaatcggaaaggaggtagtatgtgacaaagtctaccaagaaatatcttataactattgagatgcccttagcgagagctggctgccgattgactgatgaatgaacaaaaatcctatatgacaaagtctaccaagaactattttataactattgccgattgactgatgaatgaaccgttaccgtcttcttgtacagaagtaaacacttgtatacctccaccgccccg

SEQ ID NO: 3115 - DNA, 2472 bp, Triticum aestivum
  source 1..2472: mol_type = other DNA
atgtccaggctccgctccgccagcaccgccccaatgccacgcctgaggctcctgagctgcaggagctactccatcagcaccctgccaccaagcaggtcctggagcccacacgccgccttcgccgccgccaccgagagggtgagcgccggcaccctcaccccagaggacgcccaccacctcttcgacgagctcctgcgccaaagcaccccagtgccagccaggagcctaaacggcttcctcaccgccctggccagggccagggacaccgacgcctgcagggacggcccagccctggccctcgccctgtttaacaggaccaggcgcgaggaagccggctcaagggtcgtgagcccaaccatctttacctacggcatccttatgaactgctgctgccacaccctccgcccagacctgggcctcgccttcttcggcagggtcctcaggatgggcctcaagaccaacgtcgtggtcgccaccaccgtgctgaagtgcctatgcggcgccaagaggaccgacgaggccgtcaacatcctcctgcataggatgtccgagctgggctgcgtcccagacgacttcagctactcaatcgtgctcaagtccctgtgcgacgacggccgctcccaaagggccctggacctcctccaaatgtgggagaaggagaggggcgtctgctccccaaacgtcgtggcctacaacatcgtgatccacggcttcttcaaggaaggcgaggtctccaaggcctgcgacctgttccacgccatggtgcaaaggggcgtcgtgcctaacgtcatgacctacaccctcaccatcgacgccctctgcaaggccagggccatggacaaggccaagctgttcctcaggcagatgatcgacaagggcgtgaggccaaacaacgtgacctacaacgtgatgatccacggctactccaccctgggccagtggaaggaagccggcaaggtgttccgcgagatgagccgccagggcctgatccctgacatcgtgacctggacctccttcatggccagcctctgcaagcacggcaggaccaaggaagccgccaacttcttcgacagcatgaccgccaagggccacaagccagacctggtcacctaccacgtgctcctgcacggctacggcaccgagggctgcttcgccgacatgatcaacctcgtgaacagcatggccaccaagggcatcgtgccagataggcaggtcttcaacatcctgatcgacgcccacgccaagcacggcatgatggacgaggccatgcacatcttcaccggcatgcaaggccagggcgtctgcccagacgtgtggacctactccaccatcatcagcgccctctgccgcatgggcaggctggccgacggcatggacaacttctcccaaatgatcggcaagggcgtggagcctaacaccgtcgtgtaccactccctcatccaaggcttcagcacccacggcgacctccgcaaggccaaggagctggtgtacgagatgaggaacaagggcatcccatgcccaaacatcgccttcttcacctccatcatggacagcctgtgcaaggaaggccgcgtcatggacgcccacgacatcttcaacctcgtgaccgacatcggcgagaagccaaacgtcatcacctttaacaccctcatcgacggccactgcctggtgggcgagatggagaaagccttcggcgtgctcgacagcatggtctccgccggcatcgaggccgacgtcttcacctacaacaccctggcctacggctactgccgctgcggcaggatcgacgacggcctaatcctgttcagggagatgctccgcaagaagccaaagccaaccaccatcacctacaacatcatcctggacggcctcttcagggccggcaggaccgtggccgccaagaaaatgttccacgagatgatcgagggcggcatcaccgtgtccatgagcacctactccatcatcctcggcggcctgtgcaggaacaactgcgccgaggaagccatcaccctgttccaaaagctgggcgccatgaacgtgaagctggacatcaggatcctcaacaccatgatcaacgccatgttcaaggtccgcaggcgcgaggaagccaacagcctgttcgccgccatcagcgcctccggcatggccccaaacgcctccacctacggcctcatgatcggcaacctgctcaaggaaggctccgtccaagaggccgagaatatgttctccctcatggagaagtccggctgcgccccaggcagcaggctcatcaacaacatcatccgcatcctcctggagaagggcgacatcgtgaaggccggcaactacatgtccaaggtggacggcaagaccatctccctggaggcctccaccaccagcctgctgatgtgcctcttctccagcaagggccgctacagggagcagatcaacctgctcccaggcaactaccaattcttcaacggcgtctcctga

SEQ ID NO: 3116 - DNA, 2469 bp, Triticum aestivum; identical to SEQ ID NO: 1781
  source 1..2469: mol_type = genomic DNA

SEQ ID NO: 3117 - DNA, 2226 bp, Triticum aestivum
  source 1..2226: mol_type = other DNA
atgcctcgcttctccaccaccacgccaatgtcgccaccccgcctcctcctccgactcggcgcccgccactcctcctccacctctcatccctcacgcatctgggatccccacgccgccttcgccgctgcgacgcagcgggcgcgctctggcacgctcaccacggaggacgcacaccacctgtttgatgaattgctgcggcagggcaatcctgtccaggagcgtcccttgactaactttctggctgccctcgcccgcgcgcccgcgtccgcattctgcagcgatggccctgccctggccgtcgccctcttcggccgtttgtcccgaggcgccggacgacgggtggcgcagccaaatgtcttcacctatggcgtcctcatggactgctgctgccgtgcgcgccgcctggatctagcgatcgccttcttcgcccgtctcctcaagacgggactggaggcaaaccaagtcatcttctgcaccctcctcaagggactctgccacgcaaagcgctcagatgaggctttggacgtggtgcttcacaggatgcctgagctaggctgcacccccaacgtggtggcctataccacggtcatccacggcttcttgaaggaaggccaagtaggcaaggcatgcaatctattccatggaatggcgcagcagggcgttgcgcctgatgtggtgacatataactcggttatcgatgcgttgtgcaaggccagagcaatggacaaggcagagtatttcctttgtgaaatggttgataatggtgtcgtacctaataatgtgacatataatagcctcatccatggatattcctctttgggccatcagaaggaggctgttagggtgctgaaagaaatgacaagacagggtatcataccagatgtcattacctgcacctcactcatgaccttcctttgcaagaatggaaaaagcaaggaagctgcagaaatttttgattcaatgcccacgaagggcctgaaacatgacgccgtttcatatgctattctccttcatgggtatgccactgaaggatgcttggttgatatgattaatctcttcaattcgatggacagagactgtattctacctaactgtcatatcttcaacatactgatttatgcatatgctaaatctgggaagcttgataaggctatgcttatatttagagatatgcagaaacaaggagtgagtccagatgcagtcacatattcaaccgtaatacatgcattttgcaaaaagggtaggttggatgatgctgtgataaagtttaatcagatgattgatacaggagtacgaccggaagcatctgcttatcgttccctaatccagggtttttgtacacatggcgatttggtgaaagcaaaggaatatgttactgaaatgatgaagaaaggtatgcttcctcctgatattatgttcttcagttcaatcatgcagaaactatgcacagaaggaagggtaatagaagcacgagatatccttgacttgatagtgcgcattggtatgaggcctaatgttttcatatttaatatactgatcggtgggtactgcctagtctgcaagatggaggatgcaacaaaaatgtttgaggatatggtgtcatttggtttagaaccttgtaatattacgtatggtatacttattaatggctattgcaaaaatagaaggattgatgatgggcttattctgttccaagagatgctgcacaagggacttaaacctacaacttttaattataatgtcatactggatgggttatttctggctggacgaactgttgctgcaaaggaaaagtttgatgagatggttgaatctggagtaagtgtgtgcagtgatacatattcgatagttcttgctggactttgcagaaataattgctctagcgaagtaatcatgctgttccagaaattaagggcaatgaacatgaaattcaatattagaattgtcactatcatgattgatgccttctacaaggttcggcgaaaccaagaagctaaggatttgtttgctgcaataccatccaatggcttggtagctaatgttgttacctacagcataatgatgaaaagtcttataaaagaaggttcagtggaagaagctgacactctttttatcgatggagaagagcggctgtactgcaaactcttggatgttaaatcatattatcagaaggttactggaaagaggagagatagtcaaggctggaaattatatgtcgaaagttga

SEQ ID NO: 3118 - DNA, 2379 bp, Triticum aestivum
  source 1..2379: mol_type = other DNA
atgcctcgcttctcctccagcacgccaatgtcgccaccacgcctccgcctcctcctcctcctccgacttggcgcccgccactcctcctccacctctcatccctcacgcatctgggatccccacgccgccttcgccgccgcgacgcagcgggctcgctctggcacgctcaccacggaggacgcacaccacctgttcgaagaattgctgcggcagggcaatcctgtccaggagcgtcccttgactaactttctggctgcccttgcccgcgcgcccgcgtccccattctgcagcgatggccccgccctggccgtcgccctcttcagccgtttgtcccgaggcgccggacgacgggtggcacagccaaatgttttcacctatggagtcctaatggactgctgctgccgtgcgcgccgcttggatctagcgatcgccttcttcgcccatctcctcaagacgggactggaggcaggccaagtcgttttcggcaccctcctcaagggactctgccacgcaaagcactcagatgaggctttggacgtggtgcttcacaggatgcctgagctaggctgcacccccgacgtggtggcctataccacggtcatccacggcttcttgaaggaaggccaagtaggcaaggcatgcaatctattccatggaatggcgcagcagggcgttgcgcctgatgtggtgacatatagctcagttattgatgcgctgtgcaaggccagagcaattgacaaggcagagtatttccttcgtgaaatggttgataatggtgtcgtacctaataatgtgacatataatagcctcatccatggatattcctctttgggccatcagaaggaggctgttagggtgctgaaagaaatgacaagacagggtatcatacctgatgtttttacttgcaactcggtcatggcctccctttgcaagaacggaaaaagcaaagaagctgcaaaaatgtttgattcaatgtccatgaagggcctgaaacctaacaccgtttcatatgttattctccttcatgggtatgccactgaaggatgcctagttgacatgatcaatctcttcaattccatggcaacagactgtattctacctaactgtcatatattcaacatactgatttatgcatatgctaaatctgggaagctcgacaaggctatgcttatatttaaagaaatgcagaaacaaggagtgagtccagatgcagtcacatattcaaccgtaatacatgcattttgcaaaaagggtaggttggatgatgctgtgataaagtttaatcagatgattgatacaggagtacgaccggacgcatctgtttatcgttccctaatccagggtttttgtacacatggcgatttggtgaaagcaaaggaatatgttactgaaatgatgaagaaaggtatgcttcctcctgatattatgttcttcagttcaatcatgcagaacctatgcacagaaggaagggtaatagaagcacgagatatccttgacttgatagtgtgcattggtatgaggcctgatgttttcatatttaatatactgatcggcggatactgcctagtccgcaagatggcagatgcatcaaaaatatttgatgatatggtgtcatatggtttagaaccttgtaatattacgtatggtatacttattaatggctattgcaaaaacggaaggattgatgacgggcttattctgttcaaggagatgctgcacaagggacttaaacctacaacttttaattataacgtcatactggatggattatttctggctagacaaactgttgctgcaaaggtgaagtttcatgagatggctgaatctggagtaagtgtgtgcattgatacatactctatagttcttggtggactttgtagaaataattgcatcggtgaagcaatcacgctatttcagaaattaagtacaatgaatgttaaattcaatattgcaattgtcaatatcatgattggtgcattcttcagggttcggcgaaaccaggaagctaaggatttgtttgctgcagtatcagccaatggtttggtagctaatgtctttacctacactgtaatgatgataaatcttatagaagaagggtcactggaagaagctgacactctctttttatcaatgaagaagtccggctgtactgccaactcttgtatgttaaatcatattatcagaaggttactggaaagaggagagatagtcaaggctggaaattatatgtcgaaagttgatgcaaagagctactcacttgaagctaaaactgttttgctgctgatctctctcttttcagggaatgggaaatatagagaacacataaaattgctccctatgaagtatcagtttctcgaagaagcagccacagttgaatag

SEQ ID NO: 3119 - DNA, 2379 bp, Triticum aestivum
  source 1..2379: mol_type = other DNA
atgcctcgcttctcctccaccacgccaatgtcgccaccccgcctcctcctccggctcggcgcccgccactcctcctccacctctcatccctcacgcatctgggatccccacgccgccttcgccgctgcgacgcagcgggcgcgctctggcacgctcaccacggaggacgcacaccacctgtttgatgaattgctgcggcagggcaatcctgtccaggagcgtcccttgactaactttctggctgccctcgcccgcgcgcccgcgtccgcattctgcagcgatggccctgccctggccgtcgccctcttcggccgtttgtcccgaggcgccggacgacgggtggcgcagccaaatgtcttcacctatggcgtcctcatggactgctgctgccgtgcgcgccgcctggatctagcgatcgccttcttcgcccgtctcctcaagacgggactggaggcaaaccaagtcatcttctgcaccctcctcaagggactctgccacgcaaagcgctcagatgaggctttggacgtggtgcttcacaggatgcctgagctaggctgcacccccaacgtggtggcctataccacggtcatccacggcttcttgaaggaaggccaagtaggcaaggcatgcaatctattccatggaatggcgcagcagggcgttgcgcctgatgtggtgacatataactcggttatcgatgcgttgtgcaaggccagagcaatggacaaggcagagtatttccttcgtgaaatggttgataatggtgtcgtacctaataatgtgacatataatagcctcatccatggatattcctctttgggccatcagaaggaggctgttagggtgctgaaagaaatgacaagacagggtatcataccagatgtcattacctgcacctcactcatgaccttcctttgcaagaatggaaaaagcaaggaagctgcagaaatttttgattcaatggccacgaagggcctgaaacatgacgccgtttcatatgctattctccttcatgggtatgccactgaaggatgcttggttgatatgattaatctcttcaattcgatggacagagactgtattctacctaactgtcatatcttcaacatactgatttatgcatatgctaaatctgggaagcttgataaggctatgcttatatttagagatatgcagaaacaaggagtgagcccagatgcattcacatattcaaccttaatacatgcattttgtaaaaagggtcggttggacgatgctatgataaagtttaatcagatggttgatacaggagtacgacagggcacagctgtttatggttctctaatccagggtttttgtacacacggcgatttggtgaaaggaaaggaattggttactgaaatgatgaacaaaggtatacctcctcctgacattatgttcttccattcaatcatgcagaacctatgcacagaaggaagggtagtagaagcacgggatatccttggcttgatagcacacataggtatgaggcctaatgtttgcacatttaatatactgattggtggatactgcctagtccgcaagatggaggatgcctcaaaaatatttcatgatatgatgtcatatggtttagaaccttctaatgttacgtatggtattcttattaatggctattgcaaaaacagaaggattgatgacgggctgattctgttcaaagaaatgttgcgcaagggacttaaacctacaacttttaattacaacatcatactggatggattatttctggctggacgaactgttgctgcaaaggaaaagtttgatgagatggttgaatctggagtaagtatgtgcatcagtacttactctatagttcttcgtggactttgtagaaataattgtagcggcgaagccatcacgctattccagacattaagcgcaatggatgtgaaattcaatattagaattgtcaatatcatgattgatgccttcttcagggttcagcgaaagcaagaagctaaggatttgtttgctgcaataacagccaatgggttggttgctaatgtttttacctacagcctaatgatgacaaatcttataaaagaagggtcagtggaagaggctgacacactctttttatcgatggagatgagcggctgtacttcgaactcgtggatgttaaatcttattatcagagggttgctggaaaaaggagagatagtcaaggctggatgttatatgtctaaagttgatgccaagagctactcacttgaagctaaaactgtttcgttgctgatctatctcttttcagggaaagggaaatacagagaacacataagattgctacctacaaagtatcagtttctcgaagaagcagccacagttgaatggtttgctatatag

SEQ ID NO: 3120 - DNA, 2358 bp, Triticum aestivum
  source 1..2358: mol_type = other DNA
atgtcgccactccgcctccgcctccgcctccggccccgcctccatgcccgccactcctactccacctcgcatcccccacgcggccagggctgggatccccacgcctccttcgcagctgccacggagcgcgcgcgatctggcaacctctcctcggaggacgcacaccacctgttcgaccaattgctcctgcaggctaatccggtcaacatgcgccttccgaacgaccttctcaccgccctggctcgcgcacctgcgtccgcatcctgcagcaacggccccgccctcgccgtcgccctcttcagccgtttgtcccaaggtgcccgccaacgggtggtgcagccaacggcctgcacctacggcatcctcatggactgctgctgccgcgcaaaccgccaggatctggcgctcgccttcttcgcccgtctcctcaggacgggactcaaggcaggcgtcatagaagtcaacactcttctcaagggactctgccgtgcaaagcgggctgatgaggctctggacattctgcttcacaggatgcctgagctaggctgcacccccaacgtggtggcatataacacggtcatccatggcttcttccaagaaggccaagcaggcaaggcgtgcagcttgttccatgaaatggcgcagcagggcgttgcgcctagtttggtgacatataactcggttattgatgcgctgtgcaaggccagagccatggacaaggcagagtatttccttggtcagatggttgatgatggtgtcatacctgataatgtgacatataatagcctcatccatggatattcctcttcaggccactggaaggaggcagttagggtattcaaagagatgacaagtcggagggttaaaccaaatgtgcatactcacaacatgtttatgacctttctttgcaaacatggaagaagcaaagaagctgcaggaatttttgataccatggctatgaagggcctgaaacataacaacgtttcatatgctattctccttcacgggtatgccaccgaaggatgcttagttgatatgattaatctcttcaattcaatggaaagatactgcattctacctgactgtcgtatcttcaacatactgattcatgcacatgctaaatctgggaagcttgataaggccatgcttatcttcaatgaaatgcagaaacaaggagtgagtccaaatgcagtcacatattcaaccataatacatgcattttgcaaaaagggtaggttggacgatgctgtgataaagtttaatcagatgattgatacaggagtacgacagggcacagctgtttatcgttccctaatccagggtttttgtacacacggcgattcggtgaaagcaaaggaattgctcactgaaatgatgaacaaaggtatgcttcctcctgatattgcattcttcaattcaatcatgcagaacctttgcacagaaggaagggtaatagaagcacgggatgtccttggcttgatagcgcacataggtatgaggcctgatgtttgcacatttaatatactgatcggtggatactgcctagtcggcaagatggaacatgcctcaaaaatatttgatgatatgatgtcatatggcttagaaccttctaatattacgtatggtatacttattaatggctattgcaaaaatagaaggattgatgacgggcttattctgttcaaagagatgctgcacaagggacttaaacctacaacttttaattataacgtcatactggatggattatttctggctggacgaactgttgctgcaaaggaaaagtttgatgagatggttgaatctggagtaagtgtgtgcattggtacatattcgatagttcttggtggactttgtagaaataattgtagcggcgaagcaatcacgctattccagaaattaagcacaatggatgtgaaattcaatattataattgtcaatataatgattgatgctttctacaaggttcagcgaaaccaagaagccaaggatttgtttgctgcagtatcagccaatggtttggtagctaatgtctttacctacaccataatgatgaaaaatcttataaaagaagggtcagtggaagaagctgacgatctctttttatcaatggagaagtccggctgtactgctgactcttatatgttaaatcttatcgtcagaatgttactgggaaaaggagagatagtcaaggctgggaattatatatctaaaattgatgcaaagagctactcacttgaagctaaaactgtttcgctgcttatctctctcttttcagggaaagggaaatatagagaacacataggattgctccctgcaaagtatcggtttcgtgaagaagcagctacagttgtgtag

SEQ ID NO: 3121 - DNA, 2001 bp, Triticum aestivum
  source 1..2001: mol_type = other DNA
atggtccgtcctgtagaaaccccaacccgtgaaatcaaaaaactcgacggcctgtgggcattcagtctggatcgcgaaaactgtggaattggtcagcgttggtgggaaagcgcgttacaagaaagccgggcaattgctgtgccaggcagttttaacgatcagttcgccgatgcagatattcgtaattatgcgggcaacgtctggtatcagcgcgaagtctttataccgaaaggttgggcaggccagcgtatcgtgctgcgtttcgatgcggtcactcattacggcaaagtgtgggtcaataatcaggaagtgatggagcatcagggcggctatacgccatttgaagccgatgtcacgccgtatgttattgccgggaaaagtgtacgtaagtttctgcttctacctttgatatatatataataattatcattaattagtagtaatataatatttcaaatatttttttcaaaataaaagaatgtagtatatagcaattgcttttctgtagtttataagtgtgtatattttaatttataacttttctaatatatgaccaaaatttgttgatgtgcaggtatcaccgtttgtgtgaacaacgaactgaactggcagactatcccgccgggaatggtgattaccgaggaaaacggcaagaaaaagcagtcttacttccatgatttctttaactatgccggaatccatcgcagcgtaatgctctacaccacgccgaacacctgggtggacgatatcaccgtggtgacgcatgtcgcgcaagactgtaaccacgcgtctgttgactggcaggtggtggccaatggtgatgtcagcgttgaactgcgtgatgcggatcaacaggtggttgcaactggacaaggcactagcgggactttgcaagtggtgaatccgcacctctggcaaccgggtgaaggttatctctatgaactgtgcgtcacagccaaaagccagacagagtgtgatatctacccgcttcgcgtcggcatccggtcagtggcagtgaagggcgaacagttcctgattaaccacaaaccgttctactttactggctttggtcgtcatgaagatgcggacttgcgtggcaaaggattcgataacgtgctgatggtgcacgaccacgcattaatggactggattggggccaactcctaccgtacctcgcattacccttacgctgaagagatgctcgactgggcagatgaacatggcatcgtggtgattgatgaaactgctgctgtcggctttaacctctctttaggcattggtttcgaagcgggcaacaagccgaaagaactgtacagcgaagaggcagtcaacggggaaactcagcaagcgcacttacaggcgattaaagagctgatagcgcgtgacaaaaaccacccaagcgtggtgatgtggagtattgccaacgaaccggatacccgtccgcaaggtgcacgggaatatttcgcgccactggcggaagcaacgcgtaaactcgacccgacgcgtccgatcacctgcgtcaatgtaatgttctgcgacgctcacaccgataccatcagcgatctctttgatgtgctgtgcctgaaccgttattacggatggtatgtccaaagcggcgatttggaaacggcagagaaggtactggaaaaagaacttctggcctggcaggagaaactgcatcagccgattatcatcaccgaatacggcgtggatacgttagccgggctgcactcaatgtacaccgacatgtggagtgaagagtatcagtgtgcatggctggatatgtatcaccgcgtctttgatcgcgtcagcgccgtcgtcggtgaacaggtatggaatttcgccgattttgcgacctcgcaaggcatattgcgcgttggcggtaacaagaaagggatcttcactcgcgaccgcaaaccgaagtcggcggcttttctgctgcaaaaacgctggactggcatgaacttcggtgaaaaaccgcagcagggaggcaaacaatga

SEQ ID NO: 3122 - DNA, 6069 bp, Triticum aestivum
  source 1..6069: mol_type = other DNA
catatttccttcactagcttggtgcgaggcttgcaactttctcctgtgatgctcatcaacaaaatcggagctgtcggtcctcgacgcctgcggccgatcgtttggcttggctgtcgaggtcatcgggtgtcgtttgttcagaggggtcttgatgggtcgtcagcgaggaaaccagagttgcctgctcgcagagaggcgatgacgatgacattgcttgcagcctcgacggtgtcctctcctcagcggtatgtgtgtggtcttgtcagtgccaggtcggccggagcgccctattcgatgggcgtgttttaattaaccgagcaactctcttcttcttaatcaatgaaaatggcaagtcttttaccttgtttcaaaaagagttagatgcactggaggtcctaaaggtttcgtcgaggtgtcagtttagtcctatgtcttccaaaatgcgcctttaggtcctaattctttcttaagtggttcacccgaggtccttttccacgaccactcgctgaccagcccacgtgccgcattgacccacgccacgtcgacagagggtccaaccgccaggcgagaagcttcgcaaagagacaccccccctcttagtggcacccctctcctctttcacggtactttggcgacattggaggcgagtggcagaggcaaccggaggtgatctggaggcaatctgagtgggtgcccgtgaagatgccccttctacgacggccagtgagcgatcctcctccatgttaccgtgagaaccctaatcttgtcgatgctcttctcctgtagctcttctaatatgccataactctgccataatcaatagttgtagtccttgatttactttgatttgcataacggtgctacggacacggcaaaaaggacacaccaccggcgacaacatacccgccgaagttggagcttgcttcgccgcgccggtggcggtgctgacgatgctgccatgctcctcatcttcagttgtttccttgccgaggagcttgaagttccggccatggataggtttagggcacacgagagagcagatttggggaagaaataaagtcagggactggggaatgagaaggtaatgttcataaggggttttctgtaaaaagaaagagcaacctaagcgacccctttgtcgacttggcgtgggtcaatgcgccacacaggcaggtcaatgagcgcttgtgagaaaaaggtcctcgggtaaaccacttgcttaaagaattactccctccgtcccatattataagaacgtttttgacactagtgtagtgtcaaaaacgttcttatattatgggacggagggagtagtacctaaaggtgcattttggactaaataagactaaagtgacacccagacgaaacttttaggacctcgagtgcatctaactcttaaaaaaacaaagatgctaaaaaaactaaatgcttaaaaatatatttttctatgggaatacttaaaaatactattataattttatggcttcctagtatatttctagggcttacaactaaatttatattcttggtctaaataaaattataatctgataaattatgtgatatgaatatgtcatataggcatatgagaccataatttaattttacctgcaaaaaataagtaatagtagtagtactactagataagataacttggtaaagcactagccccgtcgtctcccagttcaggatctacctacactgcacaccaaggccatgcctcgcttctcctccaccacgccaatgtcgccaccccgcctcctcctccggctcggcgcccgccactcctcctccacctctcatccctcacgcatctgggatccccacgccgccttcgccgctgcgacgcagcgggcgcgctctggcacgctcaccacggaggacgcacaccacctgtttgatgaattgctgcggcagggcaatcctgtccaggagcgtcccttgactaactttctggctgccctcgcccgcgcgcccgcgtccgcattctgcagcgatggccctgccctggccgtcgccctcttcggccgtttgtcccgaggcgccggacgacgggtggcgcagccaaatgtcttcacctatggcgtcctcatggactgctgctgccgtgcgcgccgcctggatctagcgatcgccttcttcgcccgtctcctcaagacgggactggaggcaaaccaagtcatcttctgcaccctcctcaagggactctgccacgcaaagcgctcagatgaggctttggacgtggtgcttcacaggatgcctgagctaggctgcacccccaacgtggtggcctataccacggtcatccacggcttcttgaaggaaggccaagtaggcaaggcatgcaatctattccatggaatggcgcagcagggcgttgcgcctgatgtggtgacatataactcggttatcgatgcgttgtgcaaggccagagcaatggacaaggcagagtatttccttcgtgaaatggttgataatggtgtcgtacctaataatgtgacatataatagcctcatccatggatattcctctttgggccatcagaaggaggctgttagggtgctgaaagaaatgacaagacagggtatcataccagatgtcattacctgcacctcactcatgaccttcctttgcaagaatggaaaaagcaaggaagctgcagaaatttttgattcaatggccacgaagggcctgaaacatgacgccgtttcatatgctattctccttcatgggtatgccactgaaggatgcttggttgatatgattaatctcttcaattcgatggacagagactgtattctacctaactgtcatatcttcaacatactgatttatgcatatgctaaatctgggaagcttgataaggctatgcttatatttagagatatgcagaaacaaggagtgagcccagatgcattcacatattcaaccttaatacatgcattttgtaaaaagggtcggttggacgatgctatgataaagtttaatcagatggttgatacaggagtacgacagggcacagctgtttatggttctctaatccagggtttttgtacacacggcgatttggtgaaaggaaaggaattggttactgaaatgatgaacaaaggtatacctcctcctgacattatgttcttccattcaatcatgcagaacctatgcacagaaggaagggtagtagaagcacgggatatccttggcttgatagcacacataggtatgaggcctaatgtttgcacatttaatatactgattggtggatactgcctagtccgcaagatggaggatgcctcaaaaatatttcatgatatgatgtcatatggtttagaaccttctaatgttacgtatggtattcttattaatggctattgcaaaaacagaaggattgatgacgggctgattctgttcaaagaaatgttgcgcaagggacttaaacctacaacttttaattacaacatcatactggatggattatttctggctggacgaactgttgctgcaaaggaaaagtttgatgagatggttgaatctggagtaagtatgtgcatcagtacttactctatagttcttcgtggactttgtagaaataattgtagcggcgaagccatcacgctattccagacattaagcgcaatggatgtgaaattcaatattagaattgtcaatatcatgattgatgccttcttcagggttcagcgaaagcaagaagctaaggatttgtttgctgcaataacagccaatgggttggttgctaatgtttttacctacagcctaatgatgacaaatcttataaaagaagggtcagtggaagaggctgacacactctttttatcgatggagatgagcggctgtacttcgaactcgtggatgttaaatcttattatcagagggttgctggaaaaaggagagatagtcaaggctggatgttatatgtctaaagttgatgcgaagagctactcacttgaagctaaaactgtttcgttgctgatctatctcttttcagggaaagggaaatacagagaacacataagattgctacctacaaagtatcagtttctcgaagaagcagccacagttgaatggtttgctatatgatatctggacgtaactcctagaagctaaacttgagttgttacttgccataggttctcctgcttttgcaacaaatgcctttcatatgtgtaaatagaaagtcagcttataagaagccgtcaggatggcagagagagaacaaatcaaacgcactccaaaacaaaagagaaacctcgccaaactgaatccaaactcaaacaggtgcatcatcaaaagtctgaagctgtactgtttgctagccaaactcctacgggagattgtcaggcggccgggcatgaagtggcaggcgtctatgcgccttcgctgctgccagcatccatggcttagcatcacacggaatcgagtcaaccaattcccagcgagtttgggcgcctccattgaagatgcaaccgtttctagccgccaaatacgcctaagggtcagagtaatcagcgagcatgccccttttgtctggttcgagaagaatttgaagaagctagcagcaacaggagcttgaccggtttgttctcatcaaagccagtttaaggttagttaattataacatggtaataaagaggtgttttgttgactgttgaggtgtaatatgttatatgccaagctcttgatgattagggtgacctgtgaagcatgcaaaagtctgaatcatatgtgcttgttagttattttggcaactttttagtcttttttccatgtacagattttatggatccatttgaagtagtatgtacattctggcattaaatatgaggtgtagaggtttacttaaggaccggtctgcaaatttttttttgatcgaggcagcaccacgttgagtttaaccctgtaacttggctcacctcgatcatgctagtgttatcgccggaaattgtattatcactgggctcagcgtttttttacattgaattaaacatactctgtggttgcagaaactgactccaaacagtgttcacagttaatatggctctgtcggtaattttcattgactgtcaacatgttccttttttgaaaagtaggctggccagttgtcgttcagtactctgtatataatgatggtaagactgacaaggatatgacggatggatttgagcttctttgccatagttcaaagtgtgcagtctgggttatgctttatattattttctttttggctttggtagtatgaacaggaagcaggcaggaacgaactgatatgtggtactatattttgttatggaatctagttgttgttgttgttatcattattattattgtcatcataatcattatcccttttctccaagaaaaagtgtgccctaaattatagatcagttcattcatctcgcctctttttttaggggccatagtctgatggattttgaagagcttctccatggttttctcttctgttccttggtgcagggcctggtggaattatgctgaactgtaacattttggtactacagaaaagttcttcttaagttggtcgctttgggggcacattacatgtttgaggtactctaatttttccttggcatgtctagaccttgaatatggtttgtattaatgcactgttattattcaaattacagatatctaattttgtggaagtttattttctgactccctagatatcctgttttagttgtactattaaaggaaaaggactaccttatatttcacccatgactttcttttaggaatcagctgtaccattttataataaattatgtacgatgaaaaatgttaacaataaaccacaccagctcaaattgtttgcgaagctgaatcttaactgatgtgaggtcatattgttcttgatcttttaaaactgtaccttgtgaataatttggcatgtctaccacattacctggttaatgccctgctgagtttagtttcataatgcatggactgtgttttatcatgttaattaaacctgtgcatttcctcaacttttatttggtatcttcagctaatgccatatgaccatccagatgaact

SEQ ID NO: 3123 - DNA, 1716 bp, Triticum aestivum
  source 1..1716: mol_type = genomic DNA
catatttccttcactagcttggtgcgaggcttgcaactttctcctgtgatgctcatcaacaaaatcggagctgtcggtcctcgacgcctgcggccgatcgtttggcttggctgtcgaggtcatcgggtgtcgtttgttcagaggggtcttgatgggtcgtcagcgaggaaaccagagttgcctgctcgcagagaggcgatgacgatgacattgcttgcagcctcgacggtgtcctctcctcagcggtatgtgtgtggtcttgtcagtgccaggtcggccggagcgccctattcgatgggcgtgttttaattaaccgagcaactctcttcttcttaatcaatgaaaatggcaagtcttttaccttgtttcaaaaagagttagatgcactggaggtcctaaaggtttcgtcgaggtgtcagtttagtcctatgtcttccaaaatgcgcctttaggtcctaattctttcttaagtggttcacccgaggtccttttccacgaccactcgctgaccagcccacgtgccgcattgacccacgccacgtcgacagagggtccaaccgccaggcgagaagcttcgcaaagagacaccccccctcttagtggcacccctctcctctttcacggtactttggcgacattggaggcgagtggcagaggcaaccggaggtgatctggaggcaatctgagtgggtgcccgtgaagatgccccttctacgacggccagtgagcgatcctcctccatgttaccgtgagaaccctaatcttgtcgatgctcttctcctgtagctcttctaatatgccataactctgccataatcaatagttgtagtccttgatttactttgatttgcataacggtgctacggacacggcaaaaaggacacaccaccggcgacaacatacccgccgaagttggagcttgcttcgccgcgccggtggcggtgctgacgatgctgccatgctcctcatcttcagttgtttccttgccgaggagcttgaagttccggccatggataggtttagggcacacgagagagcagatttggggaagaaataaagtcagggactggggaatgagaaggtaatgttcataaggggttttctgtaaaaagaaagagcaacctaagcgacccctttgtcgacttggcgtgggtcaatgcgccacacaggcaggtcaatgagcgcttgtgagaaaaaggtcctcgggtaaaccacttgcttaaagaattactccctccgtcccatattataagaacgtttttgacactagtgtagtgtcaaaaacgttcttatattatgggacggagggagtagtacctaaaggtgcattttggactaaataagactaaagtgacacccagacgaaacttttaggacctcgagtgcatctaactcttaaaaaaacaaagatgctaaaaaaactaaatgcttaaaaatatatttttctatgggaatacttaaaaatactattataattttatggcttcctagtatatttctagggcttacaactaaatttatattcttggtctaaataaaattataatctgataaattatgtgatatgaatatgtcatataggcatatgagaccataatttaattttacctgcaaaaaataagtaatagtagtagtactactagataagataacttggtaaagcactagccccgtcgtctcccagttcaggatctacctacactgcacaccaaggcc

SEQ ID NO: 3124 - DNA, 1974 bp, Triticum aestivum
  source 1..1974: mol_type = genomic DNA
tatctggacgtaactcctagaagctaaacttgagttgttacttgccataggttctcctgcttttgcaacaaatgcctttcatatgtgtaaatagaaagtcagcttataagaagccgtcaggatggcagagagagaacaaatcaaacgcactccaaaacaaaagagaaacctcgccaaactgaatccaaactcaaacaggtgcatcatcaaaagtctgaagctgtactgtttgctagccaaactcctacgggagattgtcaggcggccgggcatgaagtggcaggcgtctatgcgccttcgctgctgccagcatccatggcttagcatcacacggaatcgagtcaaccaattcccagcgagtttgggcgcctccattgaagatgcaaccgtttctagccgccaaatacgcctaagggtcagagtaatcagcgagcatgccccttttgtctggttcgagaagaatttgaagaagctagcagcaacaggagcttgaccggtttgttctcatcaaagccagtttaaggttagttaattataacatggtaataaagaggtgttttgttgactgttgaggtgtaatatgttatatgccaagctcttgatgattagggtgacctgtgaagcatgcaaaagtctgaatcatatgtgcttgttagttattttggcaactttttagtcttttttccatgtacagattttatggatccatttgaagtagtatgtacattctggcattaaatatgaggtgtagaggtttacttaaggaccggtctgcaaatttttttttgatcgaggcagcaccacgttgagtttaaccctgtaacttggctcacctcgatcatgctagtgttatcgccggaaattgtattatcactgggctcagcgtttttttacattgaattaaacatactctgtggttgcagaaactgactccaaacagtgttcacagttaatatggctctgtcggtaattttcattgactgtcaacatgttccttttttgaaaagtaggctggccagttgtcgttcagtactctgtatataatgatggtaagactgacaaggatatgacggatggatttgagcttctttgccatagttcaaagtgtgcagtctgggttatgctttatattattttctttttggctttggtagtatgaacaggaagcaggcaggaacgaactgatatgtggtactatattttgttatggaatctagttgttgttgttgttatcattattattattgtcatcataatcattatcccttttctccaagaaaaagtgtgccctaaattatagatcagttcattcatctcgcctctttttttaggggccatagtctgatggattttgaagagcttctccatggttttctcttctgttccttggtgcagggcctggtggaattatgctgaactgtaacattttggtactacagaaaagttcttcttaagttggtcgctttgggggcacattacatgtttgaggtactctaatttttccttggcatgtctagaccttgaatatggtttgtattaatgcactgttattattcaaattacagatatctaattttgtggaagtttattttctgactccctagatatcctgttttagttgtactattaaaggaaaaggactaccttatatttcacccatgactttcttttaggaatcagctgtaccattttataataaattatgtacgatgaaaaatgttaacaataaaccacaccagctcaaattgtttgcgaagctgaatcttaactgatgtgaggtcatattgttcttgatcttttaaaactgtaccttgtgaataatttggcatgtctaccacattacctggttaatgccctgctgagtttagtttcataatgcatggactgtgttttatcatgttaattaaacctgtgcatttcctcaacttttatttggtatcttcagctaatgccatatgaccatccagatgaact

SEQ ID NO: 3125 - DNA, 4926 bp, Triticum aestivum
  source 1..4926: mol_type = other DNA
gtgcagcgtgacccggtcgtgcccctctctagagataatgagcattgcatgtctaagttataaaaaattaccacatattttttttgtcacacttgtttgaagtgcagtttatctatctttatacatatatttaaactttactctacgaataatataatctatagtactacaataatatcagtgttttagagaatcatataaatgaacagttagacatggtctaaaggacaattgagtattttgacaacaggactctacagttttatctttttagtgtgcatgtgttctcctttttttttgcaaatagcttcacctatataatacttcatccattttattagtacatccatttagggtttagggttaatggtttttatagactaatttttttagtacatctattttattctattttagcctctaaattaagaaaactaaaactctattttagtttttttatttaataatttagatataaaatagaataaaataaagtgactaaaaattaaacaaataccctttaagaaattaaaaaaactaaggaaacatttttcttgtttcgagtagataatgccagcctgttaaacgccgtcgacgagtctaacggacaccaaccagcgaaccagcagcgtcgcgtcgggccaagcgaagcagacggcacggcatctctgtcgctgcctctggacccctctcgagagttccgctccaccgttggacttgctccgctgtcggcatccagaaattgcgtggcggagcggcagacgtgagccggcacggcaggcggcctcctcctcctctcacggcaccggcagctacgggggattcctttcccaccgctccttcgctttcccttcctcgcccgccgtaataaatagacaccccctccacaccctctttccccaacctcgtgttgttcggagcgcacacacacacaaccagatctcccccaaatccacccgtcggcacctccgcttcaaggtacgccgctcgtcctccccccccccccctctctaccttctctagatcggcgttccggtccatggttagggcccggtagttctacttctgttcatgtttgtgttagatccgtgtttgtgttagatccgtgctgctagcgttcgtacacggatgcgacctgtacgtcagacacgttctgattgctaacttgccagtgtttctctttggggaatcctgggatggctctagccgttccgcagacgggatcgatttcatgattttttttgtttcgttgcatagggtttggtttgcccttttcctttatttcaatatatgccgtgcacttgtttgtcgggtcatcttttcatgcttttttttgtcttggttgtgatgatgtggtctggttgggcggtcgttctagatcggagtagaattaattctgtttcaaactacctggtggatttattaattttggatctgtatgtgtgtgccatacatattcatagttacgaattgaagatgatggatggaaatatcgatctaggataggtatacatgttgatgcgggttttactgatgcatatacagagatgctttttgttcgcttggttgtgatgatgtggtgtggttgggcggtcgttcattcgttctagatcggagtagaatactgtttcaaactacctggtgtatttattaattttggaactgtatgtgtgtgtcatacatcttcatagttacgagtttaagatggatggaaatatcgatctaggataggtatacatgttgatgtgggttttactgatgcatatacatgatggcatatgcagcatctattcatatgctctaaccttgagtacctatctattataataaacaagtatgttttataattattttgatcttgatatacttggatgatggcatatgcagcagctatatgtggatttttttagccctgccttcatacgctatttatttgcttggtactgtttcttttgtcgatgctcaccctgttgtttggtgttacttctgcaggtctccaccatgtccaggctccgctccgccagcaccgccccaatgccacgcctgaggctcctgagctgcaggagctactccatcagcaccctgccaccaagcaggtcctggagcccacacgccgccttcgccgccgccaccgagagggtgagcgccggcaccctcaccccagaggacgcccaccacctcttcgacgagctcctgcgccaaagcaccccagtgccagccaggagcctaaacggcttcctcaccgccctggccagggccagggacaccgacgcctgcagggacggcccagccctggccctcgccctgtttaacaggaccaggcgcgaggaagccggctcaagggtcgtgagcccaaccatctttacctacggcatccttatgaactgctgctgccacaccctccgcccagacctgggcctcgccttcttcggcagggtcctcaggatgggcctcaagaccaacgtcgtggtcgccaccaccgtgctgaagtgcctatgcggcgccaagaggaccgacgaggccgtcaacatcctcctgcataggatgtccgagctgggctgcgtcccagacgacttcagctactcaatcgtgctcaagtccctgtgcgacgacggccgctcccaaagggccctggacctcctccaaatgtgggagaaggagaggggcgtctgctccccaaacgtcgtggcctacaacatcgtgatccacggcttcttcaaggaaggcgaggtctccaaggcctgcgacctgttccacgccatggtgcaaaggggcgtcgtgcctaacgtcatgacctacaccctcaccatcgacgccctctgcaaggccagggccatggacaaggccaagctgttcctcaggcagatgatcgacaagggcgtgaggccaaacaacgtgacctacaacgtgatgatccacggctactccaccctgggccagtggaaggaagccggcaaggtgttccgcgagatgagccgccagggcctgatccctgacatcgtgacctggacctccttcatggccagcctctgcaagcacggcaggaccaaggaagccgccaacttcttcgacagcatgaccgccaagggccacaagccagacctggtcacctaccacgtgctcctgcacggctacggcaccgagggctgcttcgccgacatgatcaacctcgtgaacagcatggccaccaagggcatcgtgccagataggcaggtcttcaacatcctgatcgacgcccacgccaagcacggcatgatggacgaggccatgcacatcttcaccggcatgcaaggccagggcgtctgcccagacgtgtggacctactccaccatcatcagcgccctctgccgcatgggcaggctggccgacggcatggacaacttctcccaaatgatcggcaagggcgtggagcctaacaccgtcgtgtaccactccctcatccaaggcttcagcacccacggcgacctccgcaaggccaaggagctggtgtacgagatgaggaacaagggcatcccatgcccaaacatcgccttcttcacctccatcatggacagcctgtgcaaggaaggccgcgtcatggacgcccacgacatcttcaacctcgtgaccgacatcggcgagaagccaaacgtcatcacctttaacaccctcatcgacggccactgcctggtgggcgagatggagaaagccttcggcgtgctcgacagcatggtctccgccggcatcgaggccgacgtcttcacctacaacaccctggcctacggctactgccgctgcggcaggatcgacgacggcctaatcctgttcagggagatgctccgcaagaagccaaagccaaccaccatcacctacaacatcatcctggacggcctcttcagggccggcaggaccgtggccgccaagaaaatgttccacgagatgatcgagggcggcatcaccgtgtccatgagcacctactccatcatcctcggcggcctgtgcaggaacaactgcgccgaggaagccatcaccctgttccaaaagctgggcgccatgaacgtgaagctggacatcaggatcctcaacaccatgatcaacgccatgttcaaggtccgcaggcgcgaggaagccaacagcctgttcgccgccatcagcgcctccggcatggccccaaacgcctccacctacggcctcatgatcggcaacctgctcaaggaaggctccgtccaagaggccgagaatatgttctccctcatggagaagtccggctgcgccccaggcagcaggctcatcaacaacatcatccgcatcctcctggagaagggcgacatcgtgaaggccggcaactacatgtccaaggtggacggcaagaccatctccctggaggcctccaccaccagcctgctgatgtgcctcttctccagcaagggccgctacagggagcagatcaacctgctcccaggcaactaccaattcttcaacggcgtctcctgaaacgcatccatggacgtggattgaattgaaggtgtactactgctgtgctggtccgtggatcgtggctgtcatgcatggtttgctgtgtcttctacgatatgtacttccctttgttccgtatatgtacatcttcctcgtttggttcatgtattttcctttgaataataataaataaatcgggctttccatatcggatgcttttatatctgtgtgtatggagattgtggtatatggtttcatctcaagttgtttacgtcaagaactaaagatatttcctcaaaaaaaaagaactaaagatataatcaatgtcattaacataactcatttccatgaggagaggacgaaggacgaagtcataataagtagattggttgatattttataatcattcaaaactgcaggggttataagatcttcattttgtagaagttttagatcttccgaggggttctc

SEQ ID NO: 3126 - DNA, 5726 bp, Triticum aestivum
  source 1..5726: mol_type = other DNA
ggtggcggcccccctttcctgcctttggtcattcgtctccgcgcaggtcggctgctctggccggcccttggtggttgctgtagtgctgcggcaagggggtgccagatccatcggttcttcattcggatccagctcgtctcttgccttactcagggtcggtcaccccgtgaccttgcctgcggcagtgagggggtgtgcgtgctctgtgatgggccttgtgaggcgatggcgcgcttgctgcgcaggggtgtgcgggccaacttgtgtcggctgcgtgagggtgttggttgagtctgctccaagcgcaagcttgcccggctatggccggccggtggtggcggcgcctacgggtgtcgtttcccttgttgaaggcgttgttgtggagttcttcgacctactacaatctcgaatctggttcttcgggcgaaagccttgccccatctgggtcgggcaacgacgtcgtccgtacgatgttttccccctttggggcgttgctttgaaggccggttaacctttcccgtgctacctttgggttggtcgtgcatggtgtcatggttggctggtgctcaaccggtgatgcgagtggttggcgttgcgactcgtgcggcgacgaagatggtgatgtgcagagctgggtcgcggcttgtccttctgatgtcggcggttcgattcccctttgggtgcatctgtgcttgtttctcactatgacagagaagttgaagctgcatgcagcggggcccttgcagcaatgatgactccatgagggtggtttcggcagacggtgctctccgtaggttgcactggactagcttggtgcgaggcttgcaactttctcctgtgatgctcatcaacaaaatcggagctgtcggtcctcgacgcctgcggccgatcatttggcttggctgtcgaggtcatcgggtgtcgtttgttcagaggggtcttgatgggtcgtcagcgaggaaaccagagttgcctgctcgcggagaggcgatgacgatgacattgcttgcagcctcgacggtgtcctctcctcagcggtatgtgtgtggtcttgtcagtgccaggtcggccggagcgtcctattcgatgggcgtgttttaattaaccgagcaactctcttcttcttaatcaatgaaaatggcaagtcttttacctcgtttcaaaaagagttagatgcactggaggtatcgagatgtcagtttagtcctatgtcttccaaaatgcgcctttaggtcctaattctttcttaattggttcacccgaggtccttttccacgaccactcgctgaccagcccacgtgccgcattgacccacgccacgtcgacagagggtccaaccgccaggcgagaagcttcgcaaagagacaccccccctcttagtggcacccctctcctctttcacggtactttggcgacattggaggcgagtggcagaggcaaccggaggtgatctggaggcaatctgagtgggtgcccgtgaagatgccccttctatgacggccagtgagcggtcctcctccatgttaccgtgagaaccctaatcttgtcgatgctcttctcctgtagctcttctattatgccataactctgccataatcaatagttgtagtccttgatttacttcgatttgcataacggtgctacggacacggcaaaaaagacacaccaccagcggcaacatactcgccgaagttggagcttgcttcgccgcgccggtggcggtgctgacgatgctgccatgctcctcatcttcagttgtttccttgccgaggagcttgaagttccggccatggataggtttagggcacacgagagagcagatttggggaagaaataaagccagggactggggaatgagaaggtaatgttcataaggggttttctgtaaaaagaaagagcaacctaagcggcccctttgtcgacttggcgtgggtcaatgcgccacataggcaggtcaatgagcgcttgtgagaaaaaggtcctcgggtaaaccacttgcttaaagaattactccctccgtcctataatataagaacgtttttgacactcactagtgtagtgtcaaaaacgtttttatattatgggacggagggagtagtacctaaaggtgcattttggactaaataagactaaagtgacaccccgacgaaacttttaggacctcgagtgcatttaactcttaaaaaaacaaagatgctaaaaaaactaaatgcttaaaaatatatttttctatgggaatacttaaaaatactattataattttatggcttcctagtatatttctagggcttacaactaaatttatattcttggtctaaataaaattataatctgataaattatgtgatatgaatatgtcatatagccatatgagaccataatttaattttacctgcaaaaaataagtaatagtagtagtactactagataagataacttggtaaagcactagccccgtcgtctcccagttcaggatctacctacactgcacaccaaggccatgcctcgcttctccaccaccacgccaatgtcgccaccccgcctcctcctccgactcggcgcccgccactcctcctccacctctcatccctcacgcatctgggatccccacgccgccttcgccgctgcgacgcagcgggcgcgctctggcacgctcaccacggaggacgcacaccacctgtttgatgaattgctgcggcagggcaatcctgtccaggagcgtcccttgactaactttctggctgccctcgcccgcgcgcccgcgtccgcattctgcagcgatggccctgccctggccgtcgccctcttcggccgtttgtcccgaggcgccggacgacgggtggcgcagccaaatgtcttcacctatggcgtcctcatggactgctgctgccgtgcgcgccgcctggatctagcgatcgccttcttcgcccgtctcctcaagacgggactggaggcaaaccaagtcatcttctgcaccctcctcaagggactctgccacgcaaagcgctcagatgaggctttggacgtggtgcttcacaggatgcctgagctaggctgcacccccaacgtggtggcctataccacggtcatccacggcttcttgaaggaaggccaagtaggcaaggcatgcaatctattccatggaatggcgcagcagggcgttgcgcctgatgtggtgacatataactcggttatcgatgcgttgtgcaaggccagagcaatggacaaggcagagtatttcctttgtgaaatggttgataatggtgtcgtacctaataatgtgacatataatagcctcatccatggatattcctctttgggccatcagaaggaggctgttagggtgctgaaagaaatgacaagacagggtatcataccagatgtcattacctgcacctcactcatgaccttcctttgcaagaatggaaaaagcaaggaagctgcagaaatttttgattcaatgcccacgaagggcctgaaacatgacgccgtttcatatgctattctccttcatgggtatgccactgaaggatgcttggttgatatgattaatctcttcaattcgatggacagagactgtattctacctaactgtcatatcttcaacatactgatttatgcatatgctaaatctgggaagcttgataaggctatgcttatatttagagatatgcagaaacaaggagtgagtccagatgcagtcacatattcaaccgtaatacatgcattttgcaaaaagggtaggttggatgatgctgtgataaagtttaatcagatgattgatacaggagtacgaccggaagcatctgcttatcgttccctaatccagggtttttgtacacatggcgatttggtgaaagcaaaggaatatgttactgaaatgatgaagaaaggtatgcttcctcctgatattatgttcttcagttcaatcatgcagaaactatgcacagaaggaagggtaatagaagcacgagatatccttgacttgatagtgcgcattggtatgaggcctaatgttttcatatttaatatactgatcggtgggtactgcctagtctgcaagatggaggatgcaacaaaaatgtttgaggatatggtgtcatttggtttagaaccttgtaatattacgtatggtatacttattaatggctattgcaaaaatagaaggattgatgatgggcttattctgttccaagagatgctgcacaagggacttaaacctacaacttttaattataatgtcatactggatgggttatttctggctggacgaactgttgctgcaaaggaaaagtttgatgagatggttgaatctggagtaagtgtgtgcagtgatacatattcgatagttcttgctggactttgcagaaataattgctctagcgaagtaatcatgctgttccagaaattaagggcaatgaacatgaaattcaatattagaattgtcactatcatgattgatgccttctacaaggttcggcgaaaccaagaagctaaggatttgtttgctgcaataccatccaatggcttggtagctaatgttgttacctacagcataatgatgaaaagtcttataaaagaaggttcagtggaagaagctgacactctttttatcgatggagaagagcggctgtactgcaaactcttggatgttaaatcatattatcagaaggttactggaaagaggagagatagtcaaggctggaaattatatgtcgaaagttgatgcaaagagctactcacttgaagctaaaactgtttcgctgctgatctccctcttttcagggaaagggaagtatagagaacacataaaattgctccctatgaagtatcagtttctcgaagaagcagccacagttgaatagtttgatacatgatctctgaactcaactcctagaagttaacttggattgttgcttgccatgggtccttatgcttgtacaacaaatgcattttctgtttggtaaatagaaagccagtcctaaattctgtcactttttgttaagttcgtgatgcgctgaaataactatttttttccgttagttattgtgagtagtatctgaaatttcctatatttttgtttctcaggcttatcacaatctcagtattatagtttctgcagttagtgaaagaagatctatttctagtaacatgaaagcttccataaggcttgtgttccacttctcacttgctgttttgaggctgcttgcatacattttggtcgtttctttgccacttggtaagtataattgcaactgcataatactttttctatattgtacaattcacattcagttactggaaaacttgtgccccttgtgaggattctgagtgtctttgcttcactgcttcagatatatgatatcgtcaaatattggtaaagttttgggcacttggagatgccggacttcatcattgtcaaggcttctatctgaaaattggactactgcatccgcgaggatcctgcgggcactgactgtgctcttgatagaatgctggcaacggcatggttggccgcacagagaaggagtctacctgatgaaatgcagagagcaagactatgtccaattcagaggtgttgtgcatcaaattgattttaaatgaatacacgtgctcaggtcgaaggtgaagctgggatggcactatgttttgtcatgaaaaggtgttaaggctgaaaagggaatccattgactatgtttcattgagctctgaaggtcataaggatt

SEQ ID NO: 3127 - DNA, 5511 bp, Triticum aestivum
  source 1..5511: mol_type = other DNA
gtaggatgtgtgcggggtgattggaagatccaactataaatattattgatactctcttaaaagatgggatggtgatcaccttgcaataaagagttattttttcgcgaatagcaataaagagttatttgatggcaaaaaaaaatcagatgatgtgggctggcctaggatatatagatatataacacttccccttttatattagaatacttaaacatttcgtacattgcatgttgttatatagcctgcaaaaaaggctttcgcgctgctttatataaaaagcaacatagtcaaactgatgtatggtgatgagaagatcgtcttataaaacagatcatatggaaaaacaagaaaacaatagagtgcacaccctatcacaaaacaatctagactacaactagggggagacttgcaccaagggaaaacgcatgacctcgttgcgcaactcgtaccaaggtgacaccagagagagcccctaccctcccgctcctgatcgtggagcctaagcctgcttgcggacaacaaggatcgcgatggatgccaataagggctcgtgtaaaaagataaggaggaaaaacgacagcccacgcgcgaagccaaggaaacttcgatccagcatccgaacatgcctgccaattggcgacacggtgcaccgaaggtaacctaggccccatgacgacgcccacaggagggagacgacgtaaggagtcgccatcgtcaaaaccgaagagacaatcaagggttttcatccggagccctggctccaagagagggaccacatcgacggccccaagagagatgcgacacccatgtgcatcactgccactagtgtcgaagcacaaggctttcgcctagagcctcttacaggcgtcacatcgaggaaccccgagcatcagcccacccgagggaagagatatcactaccaaacaaggcctccatggttctgggagccgtcactgccgaggcaccaccgacaccgggatcaccaagcgtggcatcctttgccatccacacaaccaaaagatgtccccaccaccgctgccaaggcgcctgctgaaaagccgctctgacggtccgccaccctaggccgccgctccggcgtccaatatcccaacctcgactccacacgcgggcaccaacccccgaaaaccgcactcaccggtggtgacacggaaagcgaaactactccatgcacgacgttcagtgaacgatctctggacgacaaggaatcaaatggctggagctgtactttgtctattcatgatcggtgtgatcaatagcgtcgtccacagatcgggcaaaggccgtcgtccgcataacatcgctccatggaaaggctcttcctttccagtcccacggcacaccacgccgacaccagcaccatctgcggcggtgaccactgaccagcgaacctaactcggtcaaggagaccaaacctggctgggagcacgctaccccatctgcctccaccccacagcacgagcacgggtgtccattcaggtacaacaggggatccacatcagaacatctccaacaatttgtatgttagtttgttggtaaaatatgccatgtcatcaaccaacaccgtaacatacaacaacttcaatggattatatctagcctgcccaatagaatgtgagataataaataaggtgctctctcattctacattggagcttgtgcaaggagtgttgattcatgtacatacaaccttcttctctttcttcatttattgtatgacacatcatcaaaaattctactacaccctttccgatttataaggcatgcacgtatccctaggtttataatttgagcaatataaaataagttgtatattctaaaaattacaccattagaaagtagaaaatctgaaatttttaataatatattttttgtgacaaatagcttgttttacgttggtttatttgtcaacctagatatacgtgcaagccctataaatcggaaaggaggtagtatgtgacaaagtctaccaagaaatatcttataactattgagatgcccttagcgagagctggctgccgattgactgatgaatgaacaaaaatcctatatgacaaagtctaccaagaactattttataactattgccgattgactgatgaatgaaccgttaccgtcttcttgtacagaagtaaacacttgtatacctccaccgccccgatgtcccgcctccgctccgcctccaccgcgccgatgccccgcctccgcctcctcagctgccgctcctactccatctccaccttgccgccgtcacgctcatggtctccccacgccgcctttgccgctgccacagagcgcgtcagcgctgggacgctcaccccggaggacgcacaccacctgttcgacgaattgctgcggcagtccactccggtccccgctcgatccctgaacggcttccttacggccctggcccgtgcgcgggacaccgacgcctgcagagacggccccgccctcgccctcgccctcttcaaccgcacccgccgagaagaggccggctcccgggtggtgtcgcccacaatcttcacctacggcatcctcatgaactgctgctgccacacgcttcgtccggatcttgggcttgccttctttgggcgcgtcctcaggatgggcctgaagacaaatgtggtcgtcgccaccacggtcctcaagtgcctctgcggcgccaaacggacagatgaggctgtgaacatcctgctacatcggatgtccgagctcgggtgtgtgcctgatgacttctcatattccattgttctgaagagcttatgtgatgatggcaggagccagcgagcacttgacctgctccagatgtgggagaaagaacgaggtgtctgctcccccaacgtagtggcatataacatagtcatccatggcttctttaaggaaggtgaagtaagcaaggcatgtgacctgttccatgcaatggtgcagcgaggggttgtgcctaatgtgatgacatataccttgactattgatgcgctgtgcaaggccagagctatggacaaagcaaagttgttcctccggcagatgattgataaaggtgttcgaccgaacaatgtgacatataatgtcatgatccatggatattccactctgggccagtggaaagaagcgggtaaagtgttcagagaaatgtcaagacagggtctcataccagatatcgttacttggacctcgttcatggcctctctctgcaagcatggaagaaccaaagaagctgccaatttttttgattccatgactgccaagggccacaagcctgatttggtcacgtatcatgttctgctccatgggtatggaaccgaaggatgctttgctgatatgattaatctcgttaattcgatggcaaccaaaggtattgttcccgatcgtcaggttttcaacattttaatcgatgcacatgctaaacatggaatgatggatgaagctatgcacatatttactggaatgcagggacaaggagtgtgtccagatgtatggacctattcaactataatatctgcactttgcagaatgggtaggctggctgatggtatggataacttcagccagatgattggtaagggagtagaaccgaacacagttgtttatcactccctaattcagggtttctctacacatggtgatttgaggaaagcgaaggagttggtttatgaaatgagaaacaaaggtattccttgtccaaacattgcattcttcacttctataatggacagtctatgcaaagaaggaagggttatggatgcacatgatatcttcaacttggttacagacataggtgagaaacctaacgtcattacgtttaatacgctgattgatggacattgcttagtcggtgagatggagaaagcatttggagtacttgattccatggtatcagctggcattgaggctgatgtttttacatataacacacttgcttatggctattgtagatgtggaaggattgatgatgggttgattctattcagagaaatgttgcgtaagaaacctaaacccacaacaattacatataacataatactggatgggttatttcgtgctgggagaacagttgctgcaaagaaaatgttccatgagatgatcgaagggggaataacagtgagcatgtccacgtacagtataatccttggaggactttgtaggaataattgtgctgaagaagcgatcaccctgtttcagaaattaggagcaatgaatgtgaaattggatattagaatactcaataccatgatcaatgcaatgttcaaggttcggagaagagaggaagctaacagtttgtttgctgcaatatcagccagtggaatggcacctaatgcttctacctacggcctaatgatagggaatcttctaaaagaaggatcagtgcaagaagccgaaaatatgttctcattaatggagaagagtggttgtgctccaggctctcgtcttataaataatatcatcagaatattattggaaaaaggtgacattgtcaaggctggaaattatatgtctaaagttgatggcaagaccatctcacttgaagcttcaactacttcgttgttgatgtgtctcttttcaagtaaagggagatatcgggaacaaatcaatttgctccctggaaattaccaatttttcaatggagtcagttgatgcaccggactagacagataaacattggcatggtttggagctctctctcaatgatgtcgacatgagttctgttccatgtgctcacaagatcgagctgagtgttcgtgttaccatagcgttttggcccgatgcatgcggctgctgggcgtgcatcctatggacatcgcccctaatctgcatgccatttccatgctcaaggttcgcatcctctcttcctcttaataatatgccagggctgttactaccccagggccttttcctctttattctccttttactttttgaggtcttcatgtttatagttagatgcctgtcattatacaccagaaaaactgtaagagttcctgaactagataccgtcataccgaacaagataacaacattaaacattcttaatacattttcttggtgcagatgtttatgtgatgacgtatgatcttaatctggaaagatctcttgtaggcatgccttgatgttgtttttccttatgttcgctagagggagcaatgtggccatccagttggcgaatttcacgttttcttctccactgatagcacaacctaagttgcacttgttatgaagatctttaattcattccatatgaatttgtcgcatatgttgttcctttttatgaattatatttatttggaattcgatcaagtaccgtagaatgtcgcccatctttggacagataactgttgacgtctcgaattttgcatttgtgtctccaagcactcttattttatcttccttgggcaaagttcttgttacattatgcacttgtgtcatccaagcactctcattttatcttccttgggaaaagttcttgctacattatgcacttgtgtcatccaagcagtc

SEQ ID NO: 3128 - DNA, 4833 bp, Triticum aestivum
  source 1..4833: mol_type = other DNA
gtgcagcgtgacccggtcgtgcccctctctagagataatgagcattgcatgtctaagttataaaaaattaccacatattttttttgtcacacttgtttgaagtgcagtttatctatctttatacatatatttaaactttactctacgaataatataatctatagtactacaataatatcagtgttttagagaatcatataaatgaacagttagacatggtctaaaggacaattgagtattttgacaacaggactctacagttttatctttttagtgtgcatgtgttctcctttttttttgcaaatagcttcacctatataatacttcatccattttattagtacatccatttagggtttagggttaatggtttttatagactaatttttttagtacatctattttattctattttagcctctaaattaagaaaactaaaactctattttagtttttttatttaataatttagatataaaatagaataaaataaagtgactaaaaattaaacaaataccctttaagaaattaaaaaaactaaggaaacatttttcttgtttcgagtagataatgccagcctgttaaacgccgtcgacgagtctaacggacaccaaccagcgaaccagcagcgtcgcgtcgggccaagcgaagcagacggcacggcatctctgtcgctgcctctggacccctctcgagagttccgctccaccgttggacttgctccgctgtcggcatccagaaattgcgtggcggagcggcagacgtgagccggcacggcaggcggcctcctcctcctctcacggcaccggcagctacgggggattcctttcccaccgctccttcgctttcccttcctcgcccgccgtaataaatagacaccccctccacaccctctttccccaacctcgtgttgttcggagcgcacacacacacaaccagatctcccccaaatccacccgtcggcacctccgcttcaaggtacgccgctcgtcctccccccccccccctctctaccttctctagatcggcgttccggtccatggttagggcccggtagttctacttctgttcatgtttgtgttagatccgtgtttgtgttagatccgtgctgctagcgttcgtacacggatgcgacctgtacgtcagacacgttctgattgctaacttgccagtgtttctctttggggaatcctgggatggctctagccgttccgcagacgggatcgatttcatgattttttttgtttcgttgcatagggtttggtttgcccttttcctttatttcaatatatgccgtgcacttgtttgtcgggtcatcttttcatgcttttttttgtcttggttgtgatgatgtggtctggttgggcggtcgttctagatcggagtagaattaattctgtttcaaactacctggtggatttattaattttggatctgtatgtgtgtgccatacatattcatagttacgaattgaagatgatggatggaaatatcgatctaggataggtatacatgttgatgcgggttttactgatgcatatacagagatgctttttgttcgcttggttgtgatgatgtggtgtggttgggcggtcgttcattcgttctagatcggagtagaatactgtttcaaactacctggtgtatttattaattttggaactgtatgtgtgtgtcatacatcttcatagttacgagtttaagatggatggaaatatcgatctaggataggtatacatgttgatgtgggttttactgatgcatatacatgatggcatatgcagcatctattcatatgctctaaccttgagtacctatctattataataaacaagtatgttttataattattttgatcttgatatacttggatgatggcatatgcagcagctatatgtggatttttttagccctgccttcatacgctatttatttgcttggtactgtttcttttgtcgatgctcaccctgttgtttggtgttacttctgcaggtctccaccatgcctcgcttctcctccagcacgccaatgtcgccaccacgcctccgcctcctcctcctcctccgacttggcgcccgccactcctcctccacctctcatccctcacgcatctgggatccccacgccgccttcgccgccgcgacgcagcgggctcgctctggcacgctcaccacggaggacgcacaccacctgttcgaagaattgctgcggcagggcaatcctgtccaggagcgtcccttgactaactttctggctgcccttgcccgcgcgcccgcgtccccattctgcagcgatggccccgccctggccgtcgccctcttcagccgtttgtcccgaggcgccggacgacgggtggcacagccaaatgttttcacctatggagtcctaatggactgctgctgccgtgcgcgccgcttggatctagcgatcgccttcttcgcccatctcctcaagacgggactggaggcaggccaagtcgttttcggcaccctcctcaagggactctgccacgcaaagcactcagatgaggctttggacgtggtgcttcacaggatgcctgagctaggctgcacccccgacgtggtggcctataccacggtcatccacggcttcttgaaggaaggccaagtaggcaaggcatgcaatctattccatggaatggcgcagcagggcgttgcgcctgatgtggtgacatatagctcagttattgatgcgctgtgcaaggccagagcaattgacaaggcagagtatttccttcgtgaaatggttgataatggtgtcgtacctaataatgtgacatataatagcctcatccatggatattcctctttgggccatcagaaggaggctgttagggtgctgaaagaaatgacaagacagggtatcatacctgatgtttttacttgcaactcggtcatggcctccctttgcaagaacggaaaaagcaaagaagctgcaaaaatgtttgattcaatgtccatgaagggcctgaaacctaacaccgtttcatatgttattctccttcatgggtatgccactgaaggatgcctagttgacatgatcaatctcttcaattccatggcaacagactgtattctacctaactgtcatatattcaacatactgatttatgcatatgctaaatctgggaagctcgacaaggctatgcttatatttaaagaaatgcagaaacaaggagtgagtccagatgcagtcacatattcaaccgtaatacatgcattttgcaaaaagggtaggttggatgatgctgtgataaagtttaatcagatgattgatacaggagtacgaccggacgcatctgtttatcgttccctaatccagggtttttgtacacatggcgatttggtgaaagcaaaggaatatgttactgaaatgatgaagaaaggtatgcttcctcctgatattatgttcttcagttcaatcatgcagaacctatgcacagaaggaagggtaatagaagcacgagatatccttgacttgatagtgtgcattggtatgaggcctgatgttttcatatttaatatactgatcggcggatactgcctagtccgcaagatggcagatgcatcaaaaatatttgatgatatggtgtcatatggtttagaaccttgtaatattacgtatggtatacttattaatggctattgcaaaaacggaaggattgatgacgggcttattctgttcaaggagatgctgcacaagggacttaaacctacaacttttaattataacgtcatactggatggattatttctggctagacaaactgttgctgcaaaggtgaagtttcatgagatggctgaatctggagtaagtgtgtgcattgatacatactctatagttcttggtggactttgtagaaataattgcatcggtgaagcaatcacgctatttcagaaattaagtacaatgaatgttaaattcaatattgcaattgtcaatatcatgattggtgcattcttcagggttcggcgaaaccaggaagctaaggatttgtttgctgcagtatcagccaatggtttggtagctaatgtctttacctacactgtaatgatgataaatcttatagaagaagggtcactggaagaagctgacactctctttttatcaatgaagaagtccggctgtactgccaactcttgtatgttaaatcatattatcagaaggttactggaaagaggagagatagtcaaggctggaaattatatgtcgaaagttgatgcaaagagctactcacttgaagctaaaactgttttgctgctgatctctctcttttcagggaatgggaaatatagagaacacataaaattgctccctatgaagtatcagtttctcgaagaagcagccacagttgaatagaacgcatccatggacgtggattgaattgaaggtgtactactgctgtgctggtccgtggatcgtggctgtcatgcatggtttgctgtgtcttctacgatatgtacttccctttgttccgtatatgtacatcttcctcgtttggttcatgtattttcctttgaataataataaataaatcgggctttccatatcggatgcttttatatctgtgtgtatggagattgtggtatatggtttcatctcaagttgtttacgtcaagaactaaagatatttcctcaaaaaaaaagaactaaagatataatcaatgtcattaacataactcatttccatgaggagaggacgaaggacgaagtcataataagtagattggttgatattttataatcattcaaaactgcaggggttataagatcttcattttgtagaagttttagatcttccgaggggttctc

SEQ ID NO: 3129 - DNA, 4833 bp, Triticum aestivum
  source 1..4833: mol_type = other DNA
gtgcagcgtgacccggtcgtgcccctctctagagataatgagcattgcatgtctaagttataaaaaattaccacatattttttttgtcacacttgtttgaagtgcagtttatctatctttatacatatatttaaactttactctacgaataatataatctatagtactacaataatatcagtgttttagagaatcatataaatgaacagttagacatggtctaaaggacaattgagtattttgacaacaggactctacagttttatctttttagtgtgcatgtgttctcctttttttttgcaaatagcttcacctatataatacttcatccattttattagtacatccatttagggtttagggttaatggtttttatagactaatttttttagtacatctattttattctattttagcctctaaattaagaaaactaaaactctattttagtttttttatttaataatttagatataaaatagaataaaataaagtgactaaaaattaaacaaataccctttaagaaattaaaaaaactaaggaaacatttttcttgtttcgagtagataatgccagcctgttaaacgccgtcgacgagtctaacggacaccaaccagcgaaccagcagcgtcgcgtcgggccaagcgaagcagacggcacggcatctctgtcgctgcctctggacccctctcgagagttccgctccaccgttggacttgctccgctgtcggcatccagaaattgcgtggcggagcggcagacgtgagccggcacggcaggcggcctcctcctcctctcacggcaccggcagctacgggggattcctttcccaccgctccttcgctttcccttcctcgcccgccgtaataaatagacaccccctccacaccctctttccccaacctcgtgttgttcggagcgcacacacacacaaccagatctcccccaaatccacccgtcggcacctccgcttcaaggtacgccgctcgtcctccccccccccccctctctaccttctctagatcggcgttccggtccatggttagggcccggtagttctacttctgttcatgtttgtgttagatccgtgtttgtgttagatccgtgctgctagcgttcgtacacggatgcgacctgtacgtcagacacgttctgattgctaacttgccagtgtttctctttggggaatcctgggatggctctagccgttccgcagacgggatcgatttcatgattttttttgtttcgttgcatagggtttggtttgcccttttcctttatttcaatatatgccgtgcacttgtttgtcgggtcatcttttcatgcttttttttgtcttggttgtgatgatgtggtctggttgggcggtcgttctagatcggagtagaattaattctgtttcaaactacctggtggatttattaattttggatctgtatgtgtgtgccatacatattcatagttacgaattgaagatgatggatggaaatatcgatctaggataggtatacatgttgatgcgggttttactgatgcatatacagagatgctttttgttcgcttggttgtgatgatgtggtgtggttgggcggtcgttcattcgttctagatcggagtagaatactgtttcaaactacctggtgtatttattaattttggaactgtatgtgtgtgtcatacatcttcatagttacgagtttaagatggatggaaatatcgatctaggataggtatacatgttgatgtgggttttactgatgcatatacatgatggcatatgcagcatctattcatatgctctaaccttgagtacctatctattataataaacaagtatgttttataattattttgatcttgatatacttggatgatggcatatgcagcagctatatgtggatttttttagccctgccttcatacgctatttatttgcttggtactgtttcttttgtcgatgctcaccctgttgtttggtgttacttctgcaggtctccaccatgcctcgcttctcctccaccacgccaatgtcgccaccccgcctcctcctccggctcggcgcccgccactcctcctccacctctcatccctcacgcatctgggatccccacgccgccttcgccgctgcgacgcagcgggcgcgctctggcacgctcaccacggaggacgcacaccacctgtttgatgaattgctgcggcagggcaatcctgtccaggagcgtcccttgactaactttctggctgccctcgcccgcgcgcccgcgtccgcattctgcagcgatggccctgccctggccgtcgccctcttcggccgtttgtcccgaggcgccggacgacgggtggcgcagccaaatgtcttcacctatggcgtcctcatggactgctgctgccgtgcgcgccgcctggatctagcgatcgccttcttcgcccgtctcctcaagacgggactggaggcaaaccaagtcatcttctgcaccctcctcaagggactctgccacgcaaagcgctcagatgaggctttggacgtggtgcttcacaggatgcctgagctaggctgcacccccaacgtggtggcctataccacggtcatccacggcttcttgaaggaaggccaagtaggcaaggcatgcaatctattccatggaatggcgcagcagggcgttgcgcctgatgtggtgacatataactcggttatcgatgcgttgtgcaaggccagagcaatggacaaggcagagtatttccttcgtgaaatggttgataatggtgtcgtacctaataatgtgacatataatagcctcatccatggatattcctctttgggccatcagaaggaggctgttagggtgctgaaagaaatgacaagacagggtatcataccagatgtcattacctgcacctcactcatgaccttcctttgcaagaatggaaaaagcaaggaagctgcagaaatttttgattcaatggccacgaagggcctgaaacatgacgccgtttcatatgctattctccttcatgggtatgccactgaaggatgcttggttgatatgattaatctcttcaattcgatggacagagactgtattctacctaactgtcatatcttcaacatactgatttatgcatatgctaaatctgggaagcttgataaggctatgcttatatttagagatatgcagaaacaaggagtgagcccagatgcattcacatattcaaccttaatacatgcattttgtaaaaagggtcggttggacgatgctatgataaagtttaatcagatggttgatacaggagtacgacagggcacagctgtttatggttctctaatccagggtttttgtacacacggcgatttggtgaaaggaaaggaattggttactgaaatgatgaacaaaggtatacctcctcctgacattatgttcttccattcaatcatgcagaacctatgcacagaaggaagggtagtagaagcacgggatatccttggcttgatagcacacataggtatgaggcctaatgtttgcacatttaatatactgattggtggatactgcctagtccgcaagatggaggatgcctcaaaaatatttcatgatatgatgtcatatggtttagaaccttctaatgttacgtatggtattcttattaatggctattgcaaaaacagaaggattgatgacgggctgattctgttcaaagaaatgttgcgcaagggacttaaacctacaacttttaattacaacatcatactggatggattatttctggctggacgaactgttgctgcaaaggaaaagtttgatgagatggttgaatctggagtaagtatgtgcatcagtacttactctatagttcttcgtggactttgtagaaataattgtagcggcgaagccatcacgctattccagacattaagcgcaatggatgtgaaattcaatattagaattgtcaatatcatgattgatgccttcttcagggttcagcgaaagcaagaagctaaggatttgtttgctgcaataacagccaatgggttggttgctaatgtttttacctacagcctaatgatgacaaatcttataaaagaagggtcagtggaagaggctgacacactctttttatcgatggagatgagcggctgtacttcgaactcgtggatgttaaatcttattatcagagggttgctggaaaaaggagagatagtcaaggctggatgttatatgtctaaagttgatgccaagagctactcacttgaagctaaaactgtttcgttgctgatctatctcttttcagggaaagggaaatacagagaacacataagattgctacctacaaagtatcagtttctcgaagaagcagccacagttgaatggtttgctatatagaacgcatccatggacgtggattgaattgaaggtgtactactgctgtgctggtccgtggatcgtggctgtcatgcatggtttgctgtgtcttctacgatatgtacttccctttgttccgtatatgtacatcttcctcgtttggttcatgtattttcctttgaataataataaataaatcgggctttccatatcggatgcttttatatctgtgtgtatggagattgtggtatatggtttcatctcaagttgtttacgtcaagaactaaagatatttcctcaaaaaaaaagaactaaagatataatcaatgtcattaacataactcatttccatgaggagaggacgaaggacgaagtcataataagtagattggttgatattttataatcattcaaaactgcaggggttataagatcttcattttgtagaagttttagatcttccgaggggttctc

SEQ ID NO: 3130 - DNA, 4812 bp, Triticum aestivum
  source 1..4812: mol_type = other DNA
gtgcagcgtgacccggtcgtgcccctctctagagataatgagcattgcatgtctaagttataaaaaattaccacatattttttttgtcacacttgtttgaagtgcagtttatctatctttatacatatatttaaactttactctacgaataatataatctatagtactacaataatatcagtgttttagagaatcatataaatgaacagttagacatggtctaaaggacaattgagtattttgacaacaggactctacagttttatctttttagtgtgcatgtgttctcctttttttttgcaaatagcttcacctatataatacttcatccattttattagtacatccatttagggtttagggttaatggtttttatagactaatttttttagtacatctattttattctattttagcctctaaattaagaaaactaaaactctattttagtttttttatttaataatttagatataaaatagaataaaataaagtgactaaaaattaaacaaataccctttaagaaattaaaaaaactaaggaaacatttttcttgtttcgagtagataatgccagcctgttaaacgccgtcgacgagtctaacggacaccaaccagcgaaccagcagcgtcgcgtcgggccaagcgaagcagacggcacggcatctctgtcgctgcctctggacccctctcgagagttccgctccaccgttggacttgctccgctgtcggcatccagaaattgcgtggcggagcggcagacgtgagccggcacggcaggcggcctcctcctcctctcacggcaccggcagctacgggggattcctttcccaccgctccttcgctttcccttcctcgcccgccgtaataaatagacaccccctccacaccctctttccccaacctcgtgttgttcggagcgcacacacacacaaccagatctcccccaaatccacccgtcggcacctccgcttcaaggtacgccgctcgtcctccccccccccccctctctaccttctctagatcggcgttccggtccatggttagggcccggtagttctacttctgttcatgtttgtgttagatccgtgtttgtgttagatccgtgctgctagcgttcgtacacggatgcgacctgtacgtcagacacgttctgattgctaacttgccagtgtttctctttggggaatcctgggatggctctagccgttccgcagacgggatcgatttcatgattttttttgtttcgttgcatagggtttggtttgcccttttcctttatttcaatatatgccgtgcacttgtttgtcgggtcatcttttcatgcttttttttgtcttggttgtgatgatgtggtctggttgggcggtcgttctagatcggagtagaattaattctgtttcaaactacctggtggatttattaattttggatctgtatgtgtgtgccatacatattcatagttacgaattgaagatgatggatggaaatatcgatctaggataggtatacatgttgatgcgggttttactgatgcatatacagagatgctttttgttcgcttggttgtgatgatgtggtgtggttgggcggtcgttcattcgttctagatcggagtagaatactgtttcaaactacctggtgtatttattaattttggaactgtatgtgtgtgtcatacatcttcatagttacgagtttaagatggatggaaatatcgatctaggataggtatacatgttgatgtgggttttactgatgcatatacatgatggcatatgcagcatctattcatatgctctaaccttgagtacctatctattataataaacaagtatgttttataattattttgatcttgatatacttggatgatggcatatgcagcagctatatgtggatttttttagccctgccttcatacgctatttatttgcttggtactgtttcttttgtcgatgctcaccctgttgtttggtgttacttctgcaggtctccaccatgtcgccactccgcctccgcctccgcctccggccccgcctccatgcccgccactcctactccacctcgcatcccccacgcggccagggctgggatccccacgcctccttcgcagctgccacggagcgcgcgcgatctggcaacctctcctcggaggacgcacaccacctgttcgaccaattgctcctgcaggctaatccggtcaacatgcgccttccgaacgaccttctcaccgccctggctcgcgcacctgcgtccgcatcctgcagcaacggccccgccctcgccgtcgccctcttcagccgtttgtcccaaggtgcccgccaacgggtggtgcagccaacggcctgcacctacggcatcctcatggactgctgctgccgcgcaaaccgccaggatctggcgctcgccttcttcgcccgtctcctcaggacgggactcaaggcaggcgtcatagaagtcaacactcttctcaagggactctgccgtgcaaagcgggctgatgaggctctggacattctgcttcacaggatgcctgagctaggctgcacccccaacgtggtggcatataacacggtcatccatggcttcttccaagaaggccaagcaggcaaggcgtgcagcttgttccatgaaatggcgcagcagggcgttgcgcctagtttggtgacatataactcggttattgatgcgctgtgcaaggccagagccatggacaaggcagagtatttccttggtcagatggttgatgatggtgtcatacctgataatgtgacatataatagcctcatccatggatattcctcttcaggccactggaaggaggcagttagggtattcaaagagatgacaagtcggagggttaaaccaaatgtgcatactcacaacatgtttatgacctttctttgcaaacatggaagaagcaaagaagctgcaggaatttttgataccatggctatgaagggcctgaaacataacaacgtttcatatgctattctccttcacgggtatgccaccgaaggatgcttagttgatatgattaatctcttcaattcaatggaaagatactgcattctacctgactgtcgtatcttcaacatactgattcatgcacatgctaaatctgggaagcttgataaggccatgcttatcttcaatgaaatgcagaaacaaggagtgagtccaaatgcagtcacatattcaaccataatacatgcattttgcaaaaagggtaggttggacgatgctgtgataaagtttaatcagatgattgatacaggagtacgacagggcacagctgtttatcgttccctaatccagggtttttgtacacacggcgattcggtgaaagcaaaggaattgctcactgaaatgatgaacaaaggtatgcttcctcctgatattgcattcttcaattcaatcatgcagaacctttgcacagaaggaagggtaatagaagcacgggatgtccttggcttgatagcgcacataggtatgaggcctgatgtttgcacatttaatatactgatcggtggatactgcctagtcggcaagatggaacatgcctcaaaaatatttgatgatatgatgtcatatggcttagaaccttctaatattacgtatggtatacttattaatggctattgcaaaaatagaaggattgatgacgggcttattctgttcaaagagatgctgcacaagggacttaaacctacaacttttaattataacgtcatactggatggattatttctggctggacgaactgttgctgcaaaggaaaagtttgatgagatggttgaatctggagtaagtgtgtgcattggtacatattcgatagttcttggtggactttgtagaaataattgtagcggcgaagcaatcacgctattccagaaattaagcacaatggatgtgaaattcaatattataattgtcaatataatgattgatgctttctacaaggttcagcgaaaccaagaagccaaggatttgtttgctgcagtatcagccaatggtttggtagctaatgtctttacctacaccataatgatgaaaaatcttataaaagaagggtcagtggaagaagctgacgatctctttttatcaatggagaagtccggctgtactgctgactcttatatgttaaatcttatcgtcagaatgttactgggaaaaggagagatagtcaaggctgggaattatatatctaaaattgatgcaaagagctactcacttgaagctaaaactgtttcgctgcttatctctctcttttcagggaaagggaaatatagagaacacataggattgctccctgcaaagtatcggtttcgtgaagaagcagctacagttgtgtagaacgcatccatggacgtggattgaattgaaggtgtactactgctgtgctggtccgtggatcgtggctgtcatgcatggtttgctgtgtcttctacgatatgtacttccctttgttccgtatatgtacatcttcctcgtttggttcatgtattttcctttgaataataataaataaatcgggctttccatatcggatgcttttatatctgtgtgtatggagattgtggtatatggtttcatctcaagttgtttacgtcaagaactaaagatatttcctcaaaaaaaaagaactaaagatataatcaatgtcattaacataactcatttccatgaggagaggacgaaggacgaagtcataataagtagattggttgatattttataatcattcaaaactgcaggggttataagatcttcattttgtagaagttttagatcttccgaggggttctc

SEQ ID NO: 3131 - DNA, 4680 bp, Triticum aestivum
  source 1..4680: mol_type = other DNA
gtgcagcgtgacccggtcgtgcccctctctagagataatgagcattgcatgtctaagttataaaaaattaccacatattttttttgtcacacttgtttgaagtgcagtttatctatctttatacatatatttaaactttactctacgaataatataatctatagtactacaataatatcagtgttttagagaatcatataaatgaacagttagacatggtctaaaggacaattgagtattttgacaacaggactctacagttttatctttttagtgtgcatgtgttctcctttttttttgcaaatagcttcacctatataatacttcatccattttattagtacatccatttagggtttagggttaatggtttttatagactaatttttttagtacatctattttattctattttagcctctaaattaagaaaactaaaactctattttagtttttttatttaataatttagatataaaatagaataaaataaagtgactaaaaattaaacaaataccctttaagaaattaaaaaaactaaggaaacatttttcttgtttcgagtagataatgccagcctgttaaacgccgtcgacgagtctaacggacaccaaccagcgaaccagcagcgtcgcgtcgggccaagcgaagcagacggcacggcatctctgtcgctgcctctggacccctctcgagagttccgctccaccgttggacttgctccgctgtcggcatccagaaattgcgtggcggagcggcagacgtgagccggcacggcaggcggcctcctcctcctctcacggcaccggcagctacgggggattcctttcccaccgctccttcgctttcccttcctcgcccgccgtaataaatagacaccccctccacaccctctttccccaacctcgtgttgttcggagcgcacacacacacaaccagatctcccccaaatccacccgtcggcacctccgcttcaaggtacgccgctcgtcctccccccccccccctctctaccttctctagatcggcgttccggtccatggttagggcccggtagttctacttctgttcatgtttgtgttagatccgtgtttgtgttagatccgtgctgctagcgttcgtacacggatgcgacctgtacgtcagacacgttctgattgctaacttgccagtgtttctctttggggaatcctgggatggctctagccgttccgcagacgggatcgatttcatgattttttttgtttcgttgcatagggtttggtttgcccttttcctttatttcaatatatgccgtgcacttgtttgtcgggtcatcttttcatgcttttttttgtcttggttgtgatgatgtggtctggttgggcggtcgttctagatcggagtagaattaattctgtttcaaactacctggtggatttattaattttggatctgtatgtgtgtgccatacatattcatagttacgaattgaagatgatggatggaaatatcgatctaggataggtatacatgttgatgcgggttttactgatgcatatacagagatgctttttgttcgcttggttgtgatgatgtggtgtggttgggcggtcgttcattcgttctagatcggagtagaatactgtttcaaactacctggtgtatttattaattttggaactgtatgtgtgtgtcatacatcttcatagttacgagtttaagatggatggaaatatcgatctaggataggtatacatgttgatgtgggttttactgatgcatatacatgatggcatatgcagcatctattcatatgctctaaccttgagtacctatctattataataaacaagtatgttttataattattttgatcttgatatacttggatgatggcatatgcagcagctatatgtggatttttttagccctgccttcatacgctatttatttgcttggtactgtttcttttgtcgatgctcaccctgttgtttggtgttacttctgcaggtctccaccatgcctcgcttctccaccaccacgccaatgtcgccaccccgcctcctcctccgactcggcgcccgccactcctcctccacctctcatccctcacgcatctgggatccccacgccgccttcgccgctgcgacgcagcgggcgcgctctggcacgctcaccacggaggacgcacaccacctgtttgatgaattgctgcggcagggcaatcctgtccaggagcgtcccttgactaactttctggctgccctcgcccgcgcgcccgcgtccgcattctgcagcgatggccctgccctggccgtcgccctcttcggccgtttgtcccgaggcgccggacgacgggtggcgcagccaaatgtcttcacctatggcgtcctcatggactgctgctgccgtgcgcgccgcctggatctagcgatcgccttcttcgcccgtctcctcaagacgggactggaggcaaaccaagtcatcttctgcaccctcctcaagggactctgccacgcaaagcgctcagatgaggctttggacgtggtgcttcacaggatgcctgagctaggctgcacccccaacgtggtggcctataccacggtcatccacggcttcttgaaggaaggccaagtaggcaaggcatgcaatctattccatggaatggcgcagcagggcgttgcgcctgatgtggtgacatataactcggttatcgatgcgttgtgcaaggccagagcaatggacaaggcagagtatttcctttgtgaaatggttgataatggtgtcgtacctaataatgtgacatataatagcctcatccatggatattcctctttgggccatcagaaggaggctgttagggtgctgaaagaaatgacaagacagggtatcataccagatgtcattacctgcacctcactcatgaccttcctttgcaagaatggaaaaagcaaggaagctgcagaaatttttgattcaatgcccacgaagggcctgaaacatgacgccgtttcatatgctattctccttcatgggtatgccactgaaggatgcttggttgatatgattaatctcttcaattcgatggacagagactgtattctacctaactgtcatatcttcaacatactgatttatgcatatgctaaatctgggaagcttgataaggctatgcttatatttagagatatgcagaaacaaggagtgagtccagatgcagtcacatattcaaccgtaatacatgcattttgcaaaaagggtaggttggatgatgctgtgataaagtttaatcagatgattgatacaggagtacgaccggaagcatctgcttatcgttccctaatccagggtttttgtacacatggcgatttggtgaaagcaaaggaatatgttactgaaatgatgaagaaaggtatgcttcctcctgatattatgttcttcagttcaatcatgcagaaactatgcacagaaggaagggtaatagaagcacgagatatccttgacttgatagtgcgcattggtatgaggcctaatgttttcatatttaatatactgatcggtgggtactgcctagtctgcaagatggaggatgcaacaaaaatgtttgaggatatggtgtcatttggtttagaaccttgtaatattacgtatggtatacttattaatggctattgcaaaaatagaaggattgatgatgggcttattctgttccaagagatgctgcacaagggacttaaacctacaacttttaattataatgtcatactggatgggttatttctggctggacgaactgttgctgcaaaggaaaagtttgatgagatggttgaatctggagtaagtgtgtgcagtgatacatattcgatagttcttgctggactttgcagaaataattgctctagcgaagtaatcatgctgttccagaaattaagggcaatgaacatgaaattcaatattagaattgtcactatcatgattgatgccttctacaaggttcggcgaaaccaagaagctaaggatttgtttgctgcaataccatccaatggcttggtagctaatgttgttacctacagcataatgatgaaaagtcttataaaagaaggttcagtggaagaagctgacactctttttatcgatggagaggagcggctgtactgcaaactcttggatgttaaatcatattatcagaaggttactggaaagaggagagatagtcaaggctggaaattatatgtcgaaagttgaaacgcatccatggacgtggattgaattgaaggtgtactactgctgtgctggtccgtggatcgtggctgtcatgcatggtttgctgtgtcttctacgatatgtacttccctttgttccgtatatgtacatcttcctcgtttggttcatgtattttcctttgaataataataaataaatcgggctttccatatcggatgcttttatatctgtgtgtatggagattgtggtatatggtttcatctcaagttgtttacgtcaagaactaaagatatttcctcaaaaaaaaagaactaaagatataatcaatgtcattaacataactcatttccatgaggagaggacgaaggacgaagtcataataagtagattggttgatattttataatcattcaaaactgcaggggttataagatcttcattttgtagaagttttagatcttccgaggggttctc

SEQ ID NO: 3132 - DNA, 5078 bp, Triticum aestivum
  source 1..5078: mol_type = genomic DNA
gtaggatgtgtgcggggtgattggaagatccaactataaatattattgatactctcttaaaagatgggatggtgatcaccttgcaataaagagttattttttcgcgaatagcaataaagagttatttgatggcaaaaaaaaatcagatgatgtgggctggcctaggatatatagatatataacacttccccttttatattagaatacttaaacatttcgtacattgcatgttgttatatagcctgcaaaaaaggctttcgcgctgctttatataaaaagcaacatagtcaaactgatgtatggtgatgagaagatcgtcttataaaacagatcatatggaaaaacaagaaaacaatagagtgcacaccctatcacaaaacaatctagactacaactagggggagacttgcaccaagggaaaacgcatgacctcgttgcgcaactcgtaccaaggtgacaccagagagagcccctaccctcccgctcctgatcgtggagcctaagcctgcttgcggacaacaaggatcgcgatggatgccaataagggctcgtgtaaaaagataaggaggaaaaacgacagcccacgcgcgaagccaaggaaacttcgatccagcatccgaacatgcctgccaattggcgacacggtgcaccgaaggtaacctaggccccatgacgacgcccacaggagggagacgacgtaaggagtcgccatcgtcaaaaccgaagagacaatcaagggttttcatccggagccctggctccaagagagggaccacatcgacggccccaagagagatgcgacacccatgtgcatcactgccactagtgtcgaagcacaaggctttcgcctagagcctcttacaggcgtcacatcgaggaaccccgagcatcagcccacccgagggaagagatatcactaccaaacaaggcctccatggttctgggagccgtcactgccgaggcaccaccgacaccgggatcaccaagcgtggcatcctttgccatccacacaaccaaaagatgtccccaccaccgctgccaaggcgcctgctgaaaagccgctctgacggtccgccaccctaggccgccgctccggcgtccaatatcccaacctcgactccacacgcgggcaccaacccccgaaaaccgcactcaccggtggtgacacggaaagcgaaactactccatgcacgacgttcagtgaacgatctctggacgacaaggaatcaaatggctggagctgtactttgtctattcatgatcggtgtgatcaatagcgtcgtccacagatcgggcaaaggccgtcgtccgcataacatcgctccatggaaaggctcttcctttccagtcccacggcacaccacgccgacaccagcaccatctgcggcggtgaccactgaccagcgaacctaactcggtcaaggagaccaaacctggctgggagcacgctaccccatctgcctccaccccacagcacgagcacgggtgtccattcaggtacaacaggggatccacatcagaacatctccaacaatttgtatgttagtttgttggtaaaatatgccatgtcatcaaccaacaccgtaacatacaacaacttcaatggattatatctagcctgcccaatagaatgtgagataataaataaggtgctctctcattctacattggagcttgtgcaaggagtgttgattcatgtacatacaaccttcttctctttcttcatttattgtatgacacatcatcaaaaattctactacaccctttccgatttataaggcatgcacgtatccctaggtttataatttgagcaatataaaataagttgtatattctaaaaattacaccattagaaagtagaaaatctgaaatttttaataatatattttttgtgacaaatagcttgttttacgttggtttatttgtcaacctagatatacgtgcaagccctataaatcggaaaggaggtagtatgtgacaaagtctaccaagaaatatcttataactattgagatgcccttagcgagagctggctgccgattgactgatgaatgaacaaaaatcctatatgacaaagtctaccaagaactattttataactattgccgattgactgatgaatgaaccgttaccgtcttcttgtacagaagtaaacacttgtatacctccaccgccccgatggtccgtcctgtagaaaccccaacccgtgaaatcaaaaaactcgacggcctgtgggcattcagtctggatcgcgaaaactgtggaattggtcagcgttggtgggaaagcgcgttacaagaaagccgggcaattgctgtgccaggcagttttaacgatcagttcgccgatgcagatattcgtaattatgcgggcaacgtctggtatcagcgcgaagtctttataccgaaaggttgggcaggccagcgtatcgtgctgcgtttcgatgcggtcactcattacggcaaagtgtgggtcaataatcaggaagtgatggagcatcagggcggctatacgccatttgaagccgatgtcacgccgtatgttattgccgggaaaagtgtacgtaagtttctgcttctacctttgatatatatataataattatcattaattagtagtaatataatatttcaaatatttttttcaaaataaaagaatgtagtatatagcaattgcttttctgtagtttataagtgtgtatattttaatttataacttttctaatatatgaccaaaatttgttgatgtgcaggtatcaccgtttgtgtgaacaacgaactgaactggcagactatcccgccgggaatggtgattaccgaggaaaacggcaagaaaaagcagtcttacttccatgatttctttaactatgccggaatccatcgcagcgtaatgctctacaccacgccgaacacctgggtggacgatatcaccgtggtgacgcatgtcgcgcaagactgtaaccacgcgtctgttgactggcaggtggtggccaatggtgatgtcagcgttgaactgcgtgatgcggatcaacaggtggttgcaactggacaaggcactagcgggactttgcaagtggtgaatccgcacctctggcaaccgggtgaaggttatctctatgaactgtgcgtcacagccaaaagccagacagagtgtgatatctacccgcttcgcgtcggcatccggtcagtggcagtgaagggcgaacagttcctgattaaccacaaaccgttctactttactggctttggtcgtcatgaagatgcggacttgcgtggcaaaggattcgataacgtgctgatggtgcacgaccacgcattaatggactggattggggccaactcctaccgtacctcgcattacccttacgctgaagagatgctcgactgggcagatgaacatggcatcgtggtgattgatgaaactgctgctgtcggctttaacctctctttaggcattggtttcgaagcgggcaacaagccgaaagaactgtacagcgaagaggcagtcaacggggaaactcagcaagcgcacttacaggcgattaaagagctgatagcgcgtgacaaaaaccacccaagcgtggtgatgtggagtattgccaacgaaccggatacccgtccgcaaggtgcacgggaatatttcgcgccactggcggaagcaacgcgtaaactcgacccgacgcgtccgatcacctgcgtcaatgtaatgttctgcgacgctcacaccgataccatcagcgatctctttgatgtgctgtgcctgaaccgttattacggatggtatgtccaaagcggcgatttggaaacggcagagaaggtactggaaaaagaacttctggcctggcaggagaaactgcatcagccgattatcatcaccgaatacggcgtggatacgttagccgggctgcactcaatgtacaccgacatgtggagtgaagagtatcagtgtgcatggctggatatgtatcaccgcgtctttgatcgcgtcagcgccgtcgtcggtgaacaggtatggaatttcgccgattttgcgacctcgcaaggcatattgcgcgttggcggtaacaagaaagggatcttcactcgcgaccgcaaaccgaagtcggcggcttttctgctgcaaaaacgctggactggcatgaacttcggtgaaaaaccgcagcagggaggcaaacaatgatgatgcaccggactagacagataaacattggcatggtttggagctctctctcaatgatgtcgacatgagttctgttccatgtgctcacaagatcgagctgagtgttcgtgttaccatagcgttttggcccgatgcatgcggctgctgggcgtgcatcctatggacatcgcccctaatctgcatgccatttccatgctcaaggttcgcatcctctcttcctcttaataatatgccagggctgttactaccccagggccttttcctctttattctccttttactttttgaggtcttcatgtttatagttagatgcctgtcattatacaccagaaaaactgtaagagttcctgaactagataccgtcataccgaacaagataacaacattaaacattcttaatacattttcttggtgcagatgtttatgtgatgacgtatgatcttaatctggaaagatctcttgtaggcatgccttgatgttgtttttccttatgttcgctagagggagcaatgtggccatccagttggcgaatttcacgttttcttctccactgatagcacaacctaagttgcacttgttatgaagatctttaattcattccatatgaatttgtcgcatatgttgttcctttttatgaattatatttatttggaattcgatcaagtaccgtagaatgtcgcccatctttggacagataactgttgacgtctcgaattttgcatttgtgtctccaagcactcttattttatcttccttgggcaaagttcttgttacattatgcacttgtgtcatccaagcactctcattttatcttccttgggaaaagttcttgctacattatgcacttgtgtcatccaagcagtctacaacagggggttgtgcctaatgagggtgacata

SEQ ID NO: 3133 - DNA, 585 bp, Triticum aestivum
  source 1..585: mol_type = genomic DNA
atggatgaagtgagcaagttactagaaaatatgtgctcaattggcttgaaactggatgttgtcacctatagcatactgatagatggttactctaagaatggaaggatagatgatgcattggttgttttcagggaaatgatggacgggaaggttgagccttctgttatcacttttaatattatgattggtgcattgcttaaaggtggcaggaaggaagaagccacagatttgtttaatggtatctggcccaaaggattagtgcccgatgttgttacatatagcttaatgatacaaaaactaatagaagaaggttctctacaagagtctgatgatctattcctttctatggagaagaatggatgtgctgccaactcacatatgctaaatgctatagttagaagcttacttcagaaaggggagattcctagggctgggacttatctgtctaaaattgatgagaggaggttcacctttgaagcttccacagctagcttgttggctgcacttgcgtcaggggggaaaggccaggaatataaggagttactccccgaaaaataccactattttctggaacagggcgctgat

SEQ ID NO: 3134 - DNA, 978 bp, Triticum aestivum; identical to SEQ ID NO: 3108
  source 1..978: mol_type = genomic DNA

SEQ ID NO: 3135 - protein, 700 aa, Triticum aestivum
NIKARYHAGDIGTEDALHLFDELLQVAGRSSIHAINCLLTVVGRDCPALGVSLFNRVARAKVAPCSITYAILVDCCCRTGRQDLGFAAMGHVIKMGFTADAMITFSHLLKAICAENKTSYAMDIVLRIMPMFNCIPDVFSYNILFKGLCNEKRSQEALELIQVMVEHGGRCQPDVVSYSTVIDGLLKEGLVGKVYILFCEMIQRGISPNAVTYNSIISGMCKVHAMDKAEQVLQQMPDRGILPNVATYTSLIHGYFSLGQCKEVDRIFKEMSRNGVQPNVVTYNIQMDYLCKNGRCAEARKIFDSMVSLGQKPTVTTYSILLHGYALERSFHEIHCLIDLMVGNGIAPNHFLYNILISAYAKEEMIGEVMHIFKKMRQHGLNPNVATYGAVVNLLSKIGRMDDAMSQFNQMITEGLAPDIIVFTLLISGFCSCGKWEKVDELFSEMLDRGICPNTVFFNIIMDCLCKNERVMEAQDLFDLMVHMGVKPDVCTYNTLIGGYLFIGKMDEVRKLLDNMVSIGLKPNVITYSILIDGYSKNGSIDDALVVSREMLAGKVKPCVITFNIMIGALLKCGRKAEAKDLFDGIWANGLVPDVITYSLMIQKLIEEGSLQESDDLFLSMEKNGCVADSHMLNAIVRSLLQKGEVPRAGTYLSKIDERRFTFEASTASLLVALASGRKSQEYKELLPEKYHYFLEEGTD

SEQ ID NO: 3136 - protein, 711 aa, Triticum aestivum
MSRRFVPVGRRILEQNIKARYHAGDIGTEDALHLFDELLQVAGRSSIHAINCLLTVVGRDCPALGVSLFNRVARSKVAPCSITYAILVDCCCRAGRQDLGFAAMGHVIKMGFTADAMITFSHLLKAICAENKTSYAMDIVLRIMPVFNCIPDVFSYNILFKGLCNEKRSQEALELIQVMVEHGGGCQPDVVSYSTVIDGLLKEGEVNKAYSLFCEMLRQGVSPNVVTCSSIISGMCKLHAMDKAEEVLQQMLDRGILPNVATYTSLIHGYFSLGQCKEVDRIFKEMSRNGVQPNILTYNIQMDYLCKNGRCAEARKIFDSMVSLGQKPTVTTYSILLHGYALERSFHEMHCLIDLMVGNGIAPNHFLYNILISACAKEEMIGEVMHIFKKMRQHGLNPNVVTYGAVVNLLSKIGRMDDAMSQFNQMITEGLAPDIIVFTLLISGFCSCGKWEKVDELFSEMLDRGIYPNTVFFNTIMDCLCKNERVMEAQDLFDLMVHMGVKPDVCTYNTLIGGYLFIGKMDEVRKLLDNMVSIGLKPNVITYSILIDGYSKNGRIDDALVVSREMLAGKVKPCVITFNIMIGALLKCGRKAEAKDLFDGIWANGLVPDVITYSLMIQKLVEEGSLQESDDLFLSMEKNGCVADSHMLNAIVRSLLRKGEVPRAGTYLSKIDERSFTLEASTASLLTALASGGKGQEYKGLLPENYHSFLE

SEQ ID NO: 3137 - protein, 715 aa, Triticum aestivum; identical to SEQ ID NO: 477

SEQ ID NO: 3138 - protein, 715 aa, Triticum aestivum; identical to SEQ ID NO: 477

SEQ ID NO: 3139 - DNA, 2627 bp, Triticum aestivum
  source 1..2627: mol_type = genomic DNA
ttctgacagtttaacctaccatgcattgattgtggtcgttcttgaagtctaatggagtacaatggttgccaacttgccatagctttactccaaagtttactcaagttatgaagggctgaatatctagcatatgaccatcagtacagcagaaaagtaaggcaaaaggtgccaaggataacttattaggacaaatccaggcctcacaaagctaattaaaaattgcagcttagctgaggccaaatgtgcaactcccttgaagtagtagccatccgtatgtatgaaacacatatactggatcaacaaaatggtgatagtcagaaagtttactactaacttgttggaagaagtactaaaaaaactctagaaaaggttgacagtcagaaagtttactactgtttctccaacgattattacatttcaaacgtactaaaaaaggaaaaggttggaagaagtaacctacaaagagaagttcacccctcgattagcactccagagcatctaggcaaaatctctagaaaaggtttcaatcagtgccctcttccagaaaatagtggtatttttcggggagtaactccttatattcctggcttttccgccctgacgcaagtgcaaccaacaagctagctgtggaagcttcaaaggtgaacctcctctcatcaattttagacagataagtcccagcccttggcacctcccctttctgaagtaagcttctaactatagcatttagcatatgggagtcggcaacacatccattcttctccatagaaaggaatagatcatcagactcttgtagagaaccttcttcaataagtttttgtatcattaagctatatgtaataacatcgggcactaatccgttggcccagataccgtcaaacaaatctttggcttctgccttcctgccacatttaagcaatgcaccaatcataatattaaaagtgataacacaaggcttaaccttcccggccaacatttccctggaaacaaccaatgcatcatctatgcttccattcttagagtaaccatcaatcagtatgctatatgtgataacatttggtttcaagccaattgagaccatattgtcaagtaacttcctcacttcatccatcttaccaatgaacaagtatccacctatcagtgtgttataagtacacacatcaggcttcacacccatgtgtaccatcaggtcgaagagatcttgggcttccataaccctttcatttttgcagaggcagtccataattatgttgaagaacactgtgttgggacagatgccgcgatccaacatctcagaaaatagttcatcaaccttctcccatttgccacaagaacagaaaccactaataaggagggtgaaaactatgatatcaggagctaacccttcagttatcatttgattgaattgggacatagcatcatccattcggccaatcttggaaagtaagtttactaccgctccataggtcgctacattagggttcaatccatgctgccgcatttttttaaatatatgcattacttcaccaatcatttcttctttagcatatgcagatatgagtatgttgtagagaaaatgatttggcgcaataccatttcccaccatcaaatcaatgagacaatgtatctcatgaaaagatcgttccagagcatacccatgaagcaaaatgctgtaggtagtaacagtcggtttttggcccaaactgaccatggaatcaaaaatcttcctagcttctgcgcatcttccattcttgcaaagataatccatctgtatattataagttacaacatttggttgaacaccatttctagacatttctttgaaaatccgatccacctctttgcactgtcctaatgaaaaatatccatgtattagactagtatacgtggcaacatttggcagaattcctctatcaggcatctgttgaagaacctgctcagccttgtccatcgcatgaaccttgcacatgccagagatgattgagttataggtcacagcattcggcgaaattcctctctgtatcatttcacaaaataggatgtaaaccttgcccaccaaaccctctttcaacaagccatcaattacggtgctataggacaccacatcaggttggcagcgacctccatgctcaaccatcacctgaatcagctcgagagcctcttggcttctcttctcgttgcagagacccttgaaaagaatgttgtaagagaagacatccggtatgcagttaaacatgggcattattcggagtacgatgtccattgcatagctggtcttgttctccgcacagatggcctttagtaggtggctgaaagtgatcatagcatctgcagtaaatcccatcttgatgacgtgtcccatggcagcgaaaccaaggtcctggcggccagtgcggcagcagcagtcgaccagaatggcataggtgatactgcagggtgccaccttggcccttgcgacgcggttgaagagggagacgccgagcgcagggcaatcacggccgacaacggtgaggaggcagttgatggcatggatcgaggagcgcccagcaacctggagcaattcgtcaaacaggtggagtgcgtcctcggtgccaatgtctccggcgtggtaccgagccttgatgttc

SEQ ID NO: 3140 - DNA, 3117 bp, Triticum aestivum
  source 1..3117: mol_type = genomic DNA
ccaccgcgccgagccgccgctgggccttcgcagcaccacgccgccaaacgccgtcgtcgactgagcttcgcgccatggccatggagtggggggccgcgccgaggagaggccccgacgccacctgctctgccggggctttgcccggcagcggcccacggcggcggcgagggggaggggagggatgtggggtggccggcggcggcgagtcagtggttccccccgtgtcgcctcgaggagggacgcgggggttgggagggtcagtgtagctgatcttcagcatctttgcatccagtctagggtgtatgtggtgtggcgtttgtatccggatggttgtatgtcgtcaatgcttcacatataaagcagccgtgagccttttttgttttttaataaaaaaaagagaaacgtttttattcagcaaagccacttcttgagagagccgaggtctcccaggccagtggcggcggcggaaaaacagagtggcggcggtcgtcctcaccggcgggcgtcggggacgcagcgcgcggcgacggagggtcgcattctcttcatcagcgtcagggccgccgcagccagcgccgagcgcggagatctcgtcctcgcccccctcaacgctgcggccgtgtcgaccagctcgccggcggccagatctcctgtacagcgcatttacctactgcagcagctgcaactcgaaggtgagcatcctggcatctcgtccatcttgctctgctttccttccttctaaccccaggttcatgcccaggctgcgccggtggtgagcggcggcggcgccatcctatcccctcgagggattcttccggccaggtggagctatgagccgccgctttgtccccgtcggcagacgcatcttagagcagaacatcaaggctcggtaccacgccggagacattggcaccgaggacgcactccacctgtttgacgaattgctccaggttgctgggcgctcctcgatccatgccatcaactgcctcctcaccgttgtcggccgtgattgccctgcgcttggcgtctccctcttcaatcgcgtcgcaaggtccaaggtggcaccctgcagtatcacctatgccattctggtcgactgctgctgccgcgctggccgccaggaccttggtttcgctgccatgggacacgtcatcaagatgggatttactgcagatgctatgatcactttcagccacctactaaaggccatctgtgcggagaacaagaccagctatgcaatggacatcgtactccgaataatgcccgtgtttaactgcataccggatgtcttctcctacaacattcttttcaagggtctctgcaacgagaagagaagccaagaggctctcgagctgattcaggtgatggttgagcatggaggtggctgccaacctgatgtggtgtcatatagcactgtaattgatggcttgttgaaagagggtgaggtgaacaaggcttacagtctattttgtgaaatgctgcgtcagggggtatcgccgaatgttgtgacctgtagttcaatcatctctggcatgtgcaagcttcatgcgatggacaaagctgaggaggttcttcaacagatgcttgatagaggaattctgccaaatgttgccacgtatactagtctaatacatggatatttttcattaggacagtgcaaagaggttgatcggattttcaaagaaatgtctagaaatggtgttcaaccaaatattttaacttacaatatacagatggattatctttgcaagaatggaagatgcgcagaagctaggaagatttttgattccatggtcagtttgggccaaaaaccgactgttactacctacagcattttgcttcatgggtatgctctggaacgatcttttcatgagatgcattgtctcattgatttgatggtgggaaatggtattgcgccaaatcattttctctacaacatactcatatctgcatgtgctaaagaagaaatgattggtgaagtaatgcatatatttaaaaaaatgcggcagcatggattgaaccctaatgtagtgacctatggagcggtagtaaacttactttccaagattggccgaatggatgatgctatgtcccaattcaatcaaatgataactgaagggttagctcctgatatcatagttttcaccctccttattagtggtttctgttcttgtggcaaatgggagaaggttgatgaactattttctgagatgttggatcgcggcatctatcccaacacagtgttcttcaacacaattatggactgcctttgcaaaaatgaaagggttatggaagcccaagatctcttcgatctgatggtacacatgggtgtgaagcctgatgtgtgtacttataacacactgataggtggatacttgttcattggtaagatggatgaagtgaggaagttacttgacaatatggtctcaattggcttgaaaccaaatgttattacatatagcatactgattgatggttactctaagaatggaaggatagatgatgcattggttgtttccagggaaatgttggccgggaaggttaagccttgtgttatcacttttaatattatgattggtgcattgcttaaatgtggcaggaaggcagaagccaaagatttgtttgacggtatctgggccaacggattagtgcccgacgttattacatatagcttaatgatacaaaaacttgttgaagaaggttctctacaagagtctgatgatctattcctttctatggagaagaatggatgtgttgccgactcccatatgctaaatgctatagttagaagcttacttcggaaaggggaggtgcccagggctgggacttatctgtctaaaattgatgagaggagcttcacccttgaagcttccacagctagcttgttgactgcacttgcttcaggggggaaaggccaagaatataaggggttactccctgaaaactaccactcttttctggaataggacactggttgaaacctgttctacagattttgcctagatgctctggagtgctaatcgagggatgaacttctctttgtaggttatttcttccaaccttttcctttttagtacgtttgaaatgtaataatcgttggagaaactgtagtaaact

SEQ ID NO: 3141 - DNA, 3748 bp, Triticum aestivum
  source 1..3748: mol_type = genomic DNA
aagtcgtaatggactgattctagttgaggacatcatgcttcccatataatgtaaaagagaaatggaatacagcaactaacttactgctgacaacttcaacgagtggtcgtgcacaagacagtcatgacgatcagtacaattttttttttgtgagtacgcaaagcttctaattaggaggcttgaggtgtacaaagtattggatctggcacaaaagaggaggcttgaggtgtacaaactagggcagaccgtgaagcaaaccacgagggggtgaggcgacggcgatcctaggactggaggaacacagatctacaatggttgctgccaactataacagcatggttaatggagtacaatggttgccaacttgccatagctttactccaaagtttactcaagttatgaagggctgaatatctagcatatgaccatcagtacagcagaaaagtaaggcaaaaggtgccaaggataacttattaggacaaatccaggcctcacaaagctaattaaaaattgcagcttagctgaggccaaatgtgcaactcccttgaagtagtagccatccgtatgtatgaaacacatatactggatcaacaaaatggtgatagtcagaaagtttactactaacttgttggaagaagtactaaaaaaactctagaaaaggttgacagtcagaaagtttactactgtttctccaacgattattacatttcaaacgtactaaaaaaggaaaaggttggaagaagtaacctacaaagagaagttcacccctcgattagcactccagagcatctaggcaaaatctctagaaaaggtttcaatcagtgccctcttccagaaaatagtggtatttttcggggagtaactccttatattcctggcttttccgccctgacgcaagtgcaaccaacaagctagctgtggaagcttcaaaggtgaacctcctctcatcaattttagacagataagtcccagcccttggcacctcccctttctgaagtaagcttctaactatagcatttagcatatgggagtcggcaacacatccattcttctccatagaaaggaatagatcatcagactcttgtagagaaccttcttcaataagtttttgtatcattaagctatatgtaataacatcgggcactaatccgttggcccagataccgtcaaacaaatctttggcttctgccttcctgccacatttaagcaatgcaccaatcataatattaaaagtgataacacaaggcttaaccttcccggccaacatttccctggaaacaaccaatgcatcatctatgcttccattcttagagtaaccatcaatcagtatgctatatgtgataacatttggtttcaagccaattgagaccatattgtcaagtaacttcctcacttcatccatcttaccaatgaacaagtatccacctatcagtgtgttataagtacacacatcaggcttcacacccatgtgtaccatcaggtcgaagagatcttgggcttccataaccctttcatttttgcagaggcagtccataattatgttgaagaacactgtgttgggacagatgccgcgatccaacatctcagaaaatagttcatcaaccttctcccatttgccacaagaacagaaaccactaataaggagggtgaaaactatgatatcaggagctaacccttcagttatcatttgattgaattgggacatagcatcatccattcggccaatcttggaaagtaagtttactaccgctccataggtcgctacattagggttcaatccatgctgccgcatttttttaaatatatgcattacttcaccaatcatttcttctttagcatatgcagatatgagtatgttgtagagaaaatgatttggcgcaataccatttcccaccatcaaatcaatgagacaatgtatctcatgaaaagatcgttccagagcatacccatgaagcaaaatgctgtaggtagtaacagtcggtttttggcccaaactgaccatggaatcaaaaatcttcctagcttctgcgcatcttccattcttgcaaagataatccatctgtatattataagttacaacatttggttgaacaccatttctagacatttctttgaaaatccgatccacctctttgcactgtcctaatgaaaaatatccatgtattagactagtatacgtggcaacatttggcagaattcctctatcaggcatctgttgaagaacctgctcagccttgtccatcgcatgaaccttgcacatgccagagatgattgagttataggtcacagcattcggcgaaattcctctctgtatcatttcacaaaataggatgtaaaccttgcccaccaaaccctctttcaacaagccatcaattacggtgctataggacaccacatcaggttggcagcgacctccatgctcaaccatcacctgaatcagctcgagagcctcttggcttctcttctcgttgcagagacccttgaaaagaatgttgtaagagaagacatccggtatgcagttaaacatgggcattattcggagtacgatgtccattgcatagctggtcttgttctccgcacagatggcctttagtaggtggctgaaagtgatcatagcatctgcagtaaatcccatcttgatgacgtgtcccatggcagcgaaaccaaggtcctggcggccagtgcggcagcagcagtcgaccagaatggcataggtgatactgcagggtgccaccttggcccttgcgacgcggttgaagagggagacgccgagcgcagggcaatcacggccgacaacggtgaggaggcagttgatggcatggatcgaggagcgcccagcaacctggagcaattcgtcaaacaggtggagtgcgtcctcggtgccaatgtctccggcgtggtaccgagccttgatgttctgctctaagatgcgtctgccgacggggacaaagcggcggctcatagctccacctggccggaagaatccctcgaggggataggatggcgccgccgccgctcaccaccggcgcagcctgggcatgaacctggggttagaaggaaggaaagcagagcaagatggaagagatgtcaggatgccaggatgctcaccgtcgagctgcagctgctgcagtaggtaaatgcgatgtacaggagatctgaccgccggcgagctggtcgacacggccgcagcgttgaggggggcgaggacgagatctccgtgctcggcgctggctgcggcggccctgacgccgatgaagagaatgcgaccctccgtcgccgcgcgctgcgtccccgaccgccgccactctgtatttccgccgccgccactggcctgggagacctcggctctctcaagaagtggctttgctgaataaaaacgtttctctttttttttattaaaaaacaaaaaaggctcacggctgctttatatgtgaagcattgacgacatacaaccatccggatacaaaagccacaccacatacaccctagactggatgcaaagatgctgaagatcagctacaccgaccctcccgacccccgcgtccctcctcgaggcgacacgaggggaaccactgactctccgccgccggccaccccacatccctcccctccccctcgccgccgccgtgggccgctgccgggcaaagccccggcagagcaggtggcggcggggcctcttctcggcgcggccccccactccatggccatggcgcaaagctcagtcgacgacggcgtttggcggcgtggt

SEQ ID NO: 3142 - DNA, 3717 bp, Triticum aestivum
  source 1..3717: mol_type = genomic DNA
ttgaggacatcatgcttcccatataatgtaaaagagaaatggaatacagcaactaacttactgctgacaacttcaacgagtggtcgtgcacaagacagtcatgacgatcagtacaattttttttttgtgagtacgcaaagcttctaattaggaggcttgaggtgtacaaagtattggatctggcacaaaagaggaggcttgaggtgtacaaactagggcagaccgtgaagcaaaccacgagggggtgaggcgacggcgatcctaggactggaggaacacagatctacaatggttgctgccaactataacagcatggttaatggagtacaatggttgccaacttgccatagctttactccaaagtttactcaagttatgaagggctgaatatctagcatatgaccatcagtacagcagaaaagtaaggcaaaaggtgccaaggataacttattaggacaaatccaggcctcacaaagctaattaaaaattgcagcttagctgaggccaaatgtgcaactcccttgaagtagtagccatccgtatgtatgaaacacatatactggatcaacaaaatggtgatagtcagaaagtttactactaacttgttggaagaagtactaaaaaaactctagaaaaggttgacagtcagaaagtttactactgtttctccaacgattattacatttcaaacgtactaaaaaaggaaaaggttggaagaagtaacctacaaagagaagttcacccctcgattagcactccagagcatctaggcaaaatctctagaaaaggtttcaatcagtgccctcttccagaaaatagtggtatttttcggggagtaactccttatattcctggcttttccgccctgacgcaagtgcaaccaacaagctagctgtggaagcttcaaaggtgaacctcctctcatcaattttagacagataagtcccagcccttggcacctcccctttctgaagtaagcttctaactatagcatttagcatatgggagtcggcaacacatccattcttctccatagaaaggaatagatcatcagactcttgtagagaaccttcttcaataagtttttgtatcattaagctatatgtaataacatcgggcactaatccgttggcccagataccgtcaaacaaatctttggcttctgccttcctgccacatttaagcaatgcaccaatcataatattaaaagtgataacacaaggcttaaccttcccggccaacatttccctggaaacaaccaatgcatcatctatgcttccattcttagagtaaccatcaatcagtatgctatatgtgataacatttggtttcaagccaattgagaccatattgtcaagtaacttcctcacttcatccatcttaccaatgaacaagtatccacctatcagtgtgttataagtacacacatcaggcttcacacccatgtgtaccatcaggtcgaagagatcttgggcttccataaccctttcatttttgcagaggcagtccataattatgttgaagaacactgtgttgggacagatgccgcgatccaacatctcagaaaatagttcatcaaccttctcccatttgccacaagaacagaaaccactaataaggagggtgaaaactatgatatcaggagctaacccttcagttatcatttgattgaattgggacatagcatcatccattcggccaatcttggaaagtaagtttactaccgctccataggtcgctacattagggttcaatccatgctgccgcatttttttaaatatatgcattacttcaccaatcatttcttctttagcatatgcagatatgagtatgttgtagagaaaatgatttggcgcaataccatttcccaccatcaaatcaatgagacaatgtatctcatgaaaagatcgttccagagcatacccatgaagcaaaatgctgtaggtagtaacagtcggtttttggcccaaactgaccatggaatcaaaaatcttcctagcttctgcgcatcttccattcttgcaaagataatccatctgtatattataagttacaacatttggttgaacaccatttctagacatttctttgaaaatccgatccacctctttgcactgtcctaatgaaaaatatccatgtattagactagtatacgtggcaacatttggcagaattcctctatcaggcatctgttgaagaacctgctcagccttgtccatcgcatgaaccttgcacatgccagagatgattgagttataggtcacagcattcggcgaaattcctctctgtatcatttcacaaaataggatgtaaaccttgcccaccaaaccctctttcaacaagccatcaattacggtgctataggacaccacatcaggttggcagcgacctccatgctcaaccatcacctgaatcagctcgagagcctcttggcttctcttctcgttgcagagacccttgaaaagaatgttgtaagagaagacatccggtatgcagttaaacatgggcattattcggagtacgatgtccattgcatagctggtcttgttctccgcacagatggcctttagtaggtggctgaaagtgatcatagcatctgcagtaaatcccatcttgatgacgtgtcccatggcagcgaaaccaaggtcctggcggccagtgcggcagcagcagtcgaccagaatggcataggtgatactgcagggtgccaccttggcccttgcgacgcggttgaagagggagacgccgagcgcagggcaatcacggccgacaacggtgaggaggcagttgatggcatggatcgaggagcgcccagcaacctggagcaattcgtcaaacaggtggagtgcgtcctcggtgccaatgtctccggcgtggtaccgagccttgatgttctgctctaagatgcgtctgccgacggggacaaagcggcggctcatagctccacctggccggaagaatccctcgaggggataggatggcgccgccgccgctcaccaccggcgcagcctgggcatgaacctggggttagaaggaaggaaagcagagcaagatggaagagatgtcaggatgccaggatgctcaccgtcgagctgcagctgctgcagtaggtaaatgcgatgtacaggagatctgaccgccggcgagctggtcgacacggccgcagcgttgaggggggcgaggacgagatctccgtgctcggcgctggctgcggcggccctgacgccgatgaagagaatgcgaccctccgtcgccgcgcgctgcgtccccgaccgccgccactctgtatttccgccgccgccactggcctgggagacctcggctctctcaagaagtggctttgctgaataaaaacgtttctctttttttttattaaaaaacaaaaaaggctcacggctgctttatatgtgaagcattgacgacatacaaccatccggatacaaaagccacaccacatacaccctagactggatgcaaagatgctgaagatcagctacaccgaccctcccgacccccgcgtccctcctcgaggcgacacgaggggaaccactgactctccgccgccggccaccccacatccctcccctccccctcgccgccgccgtgggccgctgccgggcaaagccccggcagagcaggtggcggcggggcctcttctcggcgcggccccccactccatggccatggcgcaaagctcagtcgacgacggcgtttggc

SEQ ID NO: 3143 - protein, 790 aa, Triticum aestivum
MPRFSSTTPMSPPRLRLRLRLCARHSSSTSHPSRIWDPHAAFAAAAQRASSGTLTTEDAHHLFDELLRRGNPVQERPLNKFLAALARAPASASCCDGPALAVTLFGRLSRDVGRRVAQPNVFTYGVLMDCCCRACRTDLVLAFFGRLLKTGLEANQVVFNTLLKGLCHTKRADEALDVLLHRMPELGCTPNVVAYNTVIHGFFKEGHVSKACNLFHEMAQQGVKPNVVTYNSVIDALCKARAMDKAEVVLRQMIDDGVGPDNVTYSSLIHGYSSSGHWKEAVRVFKEMTSRRVTADVHTYNMFMTFLCKHGRSKEAAGIFDTMAIKGLKPDNVSYAIRLHGYATEGCLVDMINLFNSMATHCILPNCHIFNILINAYAKSGKLDKAMLIFNEMQKQGVSPNAVTYSTVIHAFCKKGRLDDAVIKFNQMIDTGVRPDASVYRPLIQGFCTHGDLVKAKEYVTEMMKKGMPPPDIMFFSSIMQNLCTEGRVTEARDILDLIVHIGMRPNVIIFNLLIGGYCLVRKMADALKVFDDMVSYGLEPCNFTYGILINGYCKNRRIDDGLILFKEMLHKGLKPTTFNYNVILDGLFLAGQTVAAKEKFDEMVESGVSVCIDTYSIILGGLCRNSCSSEAITLFRKLSAMNVKFDITIVNIIIGALYRVERNQEAKDLFAAMPANGLVPNAVTYTVMMTNLIKEGSVEEADNLFLSMEKSGCTANSCLLNHIIRRLLEKGEIVKAGNYMSKVDAKSYSLEAKTVSLLISLFSRKGKYREHIKLLPTKYQFLEEAATVE

SEQ ID NO: 3144 - protein, 546 aa, Triticum aestivum
MPGFSSAASMSPLRLRLRLHARHSSSASQPSRRQGWDPHAAFAAATECARSGNLTPEDAHHLFDELLRQGNPVLGRPLNNLLAALARAPASSACRDGPALAVALFSRISQGARLRVLHPTACTYGILMDCSCRAHRLNLAFAFFGRLLRTGLKAGVIEVNSLLKGLCHAKRADEAMEVLLHRMPELFIGVQGTAVYRSLIQGFCTHGDLVKAKEYVTEMMKKGMPPPDIMFFSSIMQNLCTEGRVIEARDILDLIVRIGMRPDVFIFNILIGGYCLVGKMEDASKIFDDMVSYGLEPCNFTYGILINGYCKNKRIDDGLILFKEMLRKGLKPTTFNYNVILDGLFLAGQTVAAKEKFDEMVESGVSVCIDTYSIVLGGLCRNSCSSEAITLFRKLSAMNVKFNITIVNTIIGAFYRVERNQEAKDLFAAIPASGLVPNVVTYTIMIKNLIKEGSVEEADNLFLSMEKSGCSANSYLLNHIIRRLLEKGEIVKAGNYMSKVDAKSYSLEAKTVSLLISLFSRKGKYREHIKLLPTKYQFLEEAATVE

SEQ ID NO: 3145 - protein, 608 aa, Triticum aestivum
MPELGCTPNVVAYTTVIHGFFKEGQVGKACNLFHGMAQQGVAPNLVTYNSVIDALCKAKAMDKAEYFLGQMVDDGVVPDNVTYNSLIHGYSSSGHWKEAVRVFKEMTSRRVTADVHTYNMFMTFLCKHGRSKEAAGIFDTMAMKGLKPDNVSYAILLHGYATEGCLVDMINLFNSMERDCILPDCRIFNILINAYAKSGKLDKAMLIFNEMQKQGVSPNAVTYSTVIDAFCKKGQLDDAMIKFNQMIDTGVRQGTAVYGSLIQGFCTHGDLVKAKELLTEMMNKGMLPPDIKFFHSIMQNLCTEGRVIEARDVLGLIAHIGMRPDVCTFNILIGGYCLVGKMEDASKIFDDMMSYGLEPSNITYGILINGYCKNRRIDDGLILFKEMLHKGLKPTTFNYNIILDGLLLAGRTVAAKEKFNEMVESGVSVCTDTYSIVLGGLRRNNCFSEAIMLFQKLRAMNMKFNIRIVNIMIDAFFRVQRKQEAKDLFAAIPANGLVANVVTYSITMTNLIKEGSVEEADDLFLSMEKSGCTADSYMLNLIVRMLLEKGELVKAGNYMSKVDAMSYSLEAETVSLLISLFSGKGKYREHIGLLPAKYRFREEAATVV

SEQ ID NO: 3146 - DNA, 2367 bp, Triticum aestivum
  source 1..2367: mol_type = other DNA
atgccccgcttctcctccaccacgccaatgtcgccaccccgcctccgcctccgactctgcgcccgccactcctcctccacctctcatccctcacgcatctgggatccccacgccgccttcgccgccgcggcacagcgggcgagctctggcacgctcactacggaggacgcacaccacctgtttgacgaattgctgcggcggggcaatcctgtccaggagcgtcccttgaataaatttctggctgccctcgcccgcgcgcccgcgtccgcatcctgctgcgatggccccgccctggcagtcgccctcttcggccgtttgtcccgagacgtcggacgacgggtggcgcagccaaatgtcttcacctatggcgtcctcatggactgctgctgccgcgcttgccgcacagatctggtgctcgccttctttggccgtctcctcaagacgggcctggaggcaaaccaagtcgtcttcaacaccctcctcaagggcctttgccacacaaagcgggcggatgaggctctggacgtgctgcttcacaggatgcctgagctgggctgcactcctaatgtggtggcgtataacaccgttatccatggcttctttaaggaaggccatgtaagcaaggcctgcaatctgttccatgaaatggcgcagcagggcgttaagcctaatgtggtgacatataactcagttatcgatgcgctgtgcaaggccagagccatggacaaggcagaggtggtccttcgtcagatgattgatgatggtgttggacctgataatgtgacgtatagtagcctcatccatggatattcctcttcaggccactggaaggaggcagttagggtattcaaagagatgacaagtcggagggttacagcagatgtgcatacttacaacatgtttatgacctttctttgcaaacatggaagaagcaaagaagctgcaggaatttttgataccatggctatcaagggcctgaaacctgacaacgtttcatatgctattctccttcatgggtatgccgccgaaggatgcttagttgatatgattaatctcttcaattcaatggaaagagattgtattctacctgactgtcgtatcttcaacatactgattaatgcatatgctaaatctgggaagcttgataaggctatgcttatcttcaatgaaatgcagaaacaaggagtgagtccaaatgcagtcacatattcaaccgtaatacatgcattttgcaagaagggtaggttggatgatgctgtgataaagtttaatcagatgattgatacaggagtacgaccggacgcatctgtttatcgtcccctaatccagggtttttgtacacatggcgatttggtgaaagcaaaggaatatgttactgaaatgatgaagaaaggtatgcctcctcctgatattatgttcttcagttcaatcatgcagaacctatgcacagaaggaagggtaacagaagcacgggatatccttgacttgatagtgcacattggtatgaggcctaatgttatcatatttaatttgctgatcggtggatactgcctagtccgcaagatggcagatgcattgaaagtatttgatgatatggtgtcatatggtttagaaccttgtaactttacgtatggtatacttattaatggctattgcaaaaatagaaggattgatgacgggcttattctgttcaaagagatgctgcacaagggacttaaacctacaacttttaattataacgtcatactggatggattatttctggctggacaaactgttgctgcaaaagagaagtttgatgagatggttgaatctggagtaagtgtgtgcattgatacatactctataattcttggtggactttgtagaaatagctgcagtagcgaagcgatcacccttttccggaaattaagcgcaatgaatgtgaaatttgatattacaattgtcaatatcattattggtgccttatacagggtcgagagaaaccaagaggctaaggatttgtttgctgctatgccagccaatggcttggttcctaatgctgttacctacaccgtaatgatgacaaatcttataaaagaaggttcagtggaagaagctgacaatcttttcttatccatggagaagagcggctgtactgccaactcttgcctgttaaatcatatcatcagaaggttactggaaaaaggagagatagtcaaggctggaaattatatgtctaaagttgatgcaaagagctactcacttgaagctaaaactgtttcgctgctgatctctctgttttcaaggaaagggaaatatagagaacacatcaaattgcttcctacaaagtatcagtttctggaagaagcagccacagttgaatag

SEQ ID NO: 3147 - DNA, 1176 bp, Triticum aestivum
  source 1..1176: mol_type = other DNA
atgcctggcttctcctccgccgcgtcaatgtcgccactgcgcctccgcctccgcctgcacgcccgccactcctccgcctcgcaaccctcacgccgccagggatgggatccccacgccgccttcgccgccgccacggagtgtgcgcgctccggcaacctcaccccggaggacgcacataacctgttcgacgaattgctgcggcagggcaatcctgtccttgggcgccccctcaacaaccttctcgccgccctcgcccgcgcgccggcgtccagcgcctgcagagatggccccgcactcgtggtcgccctcttcagccgcatatcccaaggcgcccgcctaagggtgctgcacccaacggcctgcacctacggcatcctcatggactgcagctgccgcgcacaccgcctcgatctggcgtttgccttcttcggccgtctcctcaggacgggactgaaggcaggcgtcatagaagtcaacagtctcctcaaaggactctgccacgcaaagcgggcggatgaggccatggaagtgcttcttcacaggatgcctgagctgtttataggagtacagggcacagctgtttatcgttccctaatccagggattttgtacacacggcgatttggtgaaagcaaaggaatatgttactgaaatgatgaagaaaggtatgcctcctcctgatattatgttcttcagttcaatcatgcagaacctatgcacagaaggaagggtaatagaagcacgagatatccttgacttgatagtgcgcattggtatgaggcctgatgttttcatatttaatatactgatcggtggatactgcctagtcggcaagatggaggatgcctcaaaaatatttgatgatatggtgtcatatggtttagaaccttgtaactttacgtatggtatacttattaatggctattgcaaaaataaaaggattgatgacgggcttattctgttcaaagagatgctgcgcaagggacttaaacctacaacttttaattataacgtcatactggatggattatttctggctggacaaactgttgctgcaaaagagaagtttgatgagatggttgaatctggagtaagtgtgtgcattgatacatactctatagttcttggtggactttgtagaaatagctgcagtagcgaagcgatcaccctgttctga

SEQ ID NO: 3148 - DNA, 1629 bp, Triticum aestivum
  source 1..1629: mol_type = other DNA
atgcctcgcctctcctccaccacgccaatgtcaccaccacgcctccgcctccgactccgcggccgccactcctcctccacctctcatccctcacgcatctgggatccccacgccgccttcgccggcgcgacgcagcgggcgcactctggcaacctcaccccggaggacgcacaccacctgttcgacgaattgctgcggcagggcaatcctgtccaggagcgtcccttgactaactttctggctgccctcgcccgcgcgcccgcgtccgcatcctgcagcgatggccccgccctggccgtagccctcttcggtcgtttgtcccgaggcgccggacgacgcgtggcacagccaaatgtcttcacctatggcgtcctcatggactgctgctgccgcgcgtgccgcccggatctggcgctcgctttcttcggccgtctcttcaggaagggcctggaggcaaaccgagtcatcttctgcaccctcctcaagggactctgccacgcaaagcgcacagatgaggctctggacgtgctgcttcacaggatgcctgagctgggctgcacccccaacgtggtggcatataccacggtcatccacggcttctttaaggaaggccaagtaggcaaggcatgcaatctgttccatggaatggcgcagcagggcgttgcgcctaatttggtgacatataactcggttattgatgcgttgtgcaaggccaaagcaatggacaaggcagagtatttccttggtcagatggttgatgatggtgtcgtacctgataatgtgacatataatagcctcatccatggatattcctcttcaggccactggaaggaggcagttagggtattcaaagagatgacaagtcggagggttacagcagatgtgcatacttacaacatgtttatgacctttctttgcaaacatggaagaagcaaagaagctgcaggaatttttgataccatggctattaagggcctgaaacctgacaacgtttcatatgctattctccttcatgggtatgccaccgaaggatgcttagttgatatgattaatctcttcaattcaatggaaagagattgtattctacctgactgtcgtatcttcaacatactgattaatgcatatgctaaatctgggaagcttgataaggctatgcttatcttcaatgaaatgcagaaacaaggagtgagtccaaatgcagtcacatattcaaccgtaatacatacattttgcaaaaagggtaggttggatgatgctgtgataaagtttaatcagatgattgatacaggagtacgacagggcacagctgtttatggttctctaatccagggtttttgtacacacggcgatttggtgaaagcaaaggaattgcttactgaaatgatgaacaaaggtatgcttcctcctgatatcaagttcttccattcaatcatgcagaacctttgcacagaaggaagggtaatagaagcacgggatgtccttggcttgatagcgcacataggtatgaggcctgatgtttgcacatttaatatactgatcggtggatactgcctagtcggcaagatggaggatgcctcaaaaatatttgatgatatgatgtcatatggcttagaaccttctaattgttag

SEQ ID NO: 3149 - DNA, 2373 bp, Triticum aestivum
  source 1..2373: mol_type = other DNA
atgccccgcttctcctccaccacgccaatgtcgccaccccgcctccgcctccgcctccgactctgcgcccgccactcctcctccacctctcatccctcacgcatctgggatccccacgccgccttcgccgccgcggcacagcgggcgagctctggcacgctcactacggaggacgcacaccacctgtttgacgaattgctgcggcggggcaatcctgtccaggagcgtcccttgaataaatttctggctgccctcgcccgcgcgcccgcgtccgcatcctgctgcgatggccccgccctggcagtcaccctcttcggccgtttgtcccgagacgtcggacgacgggtggcgcagccaaatgtcttcacctatggcgtcctcatggactgctgctgccgcgcttgccgcacagatctggtgctcgccttctttggccgtctcctcaagacgggcctggaggcaaaccaagtcgtcttcaacaccctcctcaagggcctttgccacacaaagcgggcggatgaggctctggacgtgctgcttcacaggatgcctgagctgggctgcactcctaatgtggtggcgtataacaccgttatccatggcttctttaaggaaggccatgtaagcaaggcctgcaatctgttccatgaaatggcgcagcagggcgttaagcctaatgtggtgacatataactcagttattgatgcgctgtgcaaggccagagccatggacaaggcagaggtggtccttcgtcagatgattgatgatggtgttggacctgataatgtgacgtatagtagcctcatccatggatattcctcttcaggccactggaaggaggcagttagggtattcaaagagatgacaagtcggagggttacagcagatgtgcatacttacaacatgtttatgacctttctttgcaaacatggaagaagcaaagaagctgcaggaatttttgataccatggctatcaagggcctgaaacctgacaacgtttcatatgctattcgccttcatgggtatgccaccgaaggatgcctagttgacatgatcaatctcttcaattccatggcaacacactgcattctacctaactgtcatatattcaacatactgattaatgcatatgctaaatctgggaagcttgataaggctatgcttatcttcaatgaaatgcagaaacaaggagtgagtccaaatgcagtcacatattcaaccgtaatacatgcattttgcaagaagggtaggttggatgatgctgtgataaagtttaatcagatgattgatacaggagtacgaccggacgcatctgtttatcgtcccctaatccagggtttttgtacacatggcgatttggtgaaagcaaaggaatatgttactgaaatgatgaagaaaggtatgcctcctcctgatattatgttcttcagttcaatcatgcagaacctatgcacagaaggaagggtaacagaagcacgggatatccttgacttgatagtgcacattggtatgaggcctaatgttatcatatttaatttgctgatcggtggatactgcctagtccgcaagatggcagatgcattgaaagtatttgatgatatggtgtcatatggtttagaaccttgtaactttacgtatggtatacttattaatggctattgcaaaaatagaaggattgatgacgggcttattctgttcaaagagatgctgcacaagggacttaaacctacaacttttaattataacgtcatactggatggattatttctggctggacaaactgttgctgcaaaagagaagtttgatgagatggttgaatctggagtaagtgtgtgcattgatacatactctataattcttggtggactttgtagaaatagctgcagtagcgaagcgatcacccttttccggaaattaagcgcaatgaatgtgaaatttgatattacaattgtcaatatcattattggtgccttatacagggtcgagagaaaccaagaggctaaggatttgtttgctgctatgccagccaatggcttggttcctaatgctgttacctacaccgtaatgatgacaaatcttataaaagaaggttcagtggaagaagctgacaatcttttcttatccatggagaagagcggctgtactgccaactcttgcctgttaaatcatatcatcagaaggttactggaaaaaggagagatagtcaaggctggaaattatatgtctaaagttgatgcaaagagctactcacttgaagctaaaactgtttcgctgctgatctctctgttttcaaggaaagggaaatatagagaacacatcaaattgcttcctacaaagtatcagtttctggaagaagcagccacagttgaatag

SEQ ID NO: 3150 - DNA, 4821 bp, Triticum aestivum
  source 1..4821: mol_type = other DNA
gtgcagcgtgacccggtcgtgcccctctctagagataatgagcattgcatgtctaagttataaaaaattaccacatattttttttgtcacacttgtttgaagtgcagtttatctatctttatacatatatttaaactttactctacgaataatataatctatagtactacaataatatcagtgttttagagaatcatataaatgaacagttagacatggtctaaaggacaattgagtattttgacaacaggactctacagttttatctttttagtgtgcatgtgttctcctttttttttgcaaatagcttcacctatataatacttcatccattttattagtacatccatttagggtttagggttaatggtttttatagactaatttttttagtacatctattttattctattttagcctctaaattaagaaaactaaaactctattttagtttttttatttaataatttagatataaaatagaataaaataaagtgactaaaaattaaacaaataccctttaagaaattaaaaaaactaaggaaacatttttcttgtttcgagtagataatgccagcctgttaaacgccgtcgacgagtctaacggacaccaaccagcgaaccagcagcgtcgcgtcgggccaagcgaagcagacggcacggcatctctgtcgctgcctctggacccctctcgagagttccgctccaccgttggacttgctccgctgtcggcatccagaaattgcgtggcggagcggcagacgtgagccggcacggcaggcggcctcctcctcctctcacggcaccggcagctacgggggattcctttcccaccgctccttcgctttcccttcctcgcccgccgtaataaatagacaccccctccacaccctctttccccaacctcgtgttgttcggagcgcacacacacacaaccagatctcccccaaatccacccgtcggcacctccgcttcaaggtacgccgctcgtcctccccccccccccctctctaccttctctagatcggcgttccggtccatggttagggcccggtagttctacttctgttcatgtttgtgttagatccgtgtttgtgttagatccgtgctgctagcgttcgtacacggatgcgacctgtacgtcagacacgttctgattgctaacttgccagtgtttctctttggggaatcctgggatggctctagccgttccgcagacgggatcgatttcatgattttttttgtttcgttgcatagggtttggtttgcccttttcctttatttcaatatatgccgtgcacttgtttgtcgggtcatcttttcatgcttttttttgtcttggttgtgatgatgtggtctggttgggcggtcgttctagatcggagtagaattaattctgtttcaaactacctggtggatttattaattttggatctgtatgtgtgtgccatacatattcatagttacgaattgaagatgatggatggaaatatcgatctaggataggtatacatgttgatgcgggttttactgatgcatatacagagatgctttttgttcgcttggttgtgatgatgtggtgtggttgggcggtcgttcattcgttctagatcggagtagaatactgtttcaaactacctggtgtatttattaattttggaactgtatgtgtgtgtcatacatcttcatagttacgagtttaagatggatggaaatatcgatctaggataggtatacatgttgatgtgggttttactgatgcatatacatgatggcatatgcagcatctattcatatgctctaaccttgagtacctatctattataataaacaagtatgttttataattattttgatcttgatatacttggatgatggcatatgcagcagctatatgtggatttttttagccctgccttcatacgctatttatttgcttggtactgtttcttttgtcgatgctcaccctgttgtttggtgttacttctgcaggtctccaccatgccccgcttctcctccaccacgccaatgtcgccaccccgcctccgcctccgactctgcgcccgccactcctcctccacctctcatccctcacgcatctgggatccccacgccgccttcgccgccgcggcacagcgggcgagctctggcacgctcactacggaggacgcacaccacctgtttgacgaattgctgcggcggggcaatcctgtccaggagcgtcccttgaataaatttctggctgccctcgcccgcgcgcccgcgtccgcatcctgctgcgatggccccgccctggcagtcgccctcttcggccgtttgtcccgagacgtcggacgacgggtggcgcagccaaatgtcttcacctatggcgtcctcatggactgctgctgccgcgcttgccgcacagatctggtgctcgccttctttggccgtctcctcaagacgggcctggaggcaaaccaagtcgtcttcaacaccctcctcaagggcctttgccacacaaagcgggcggatgaggctctggacgtgctgcttcacaggatgcctgagctgggctgcactcctaatgtggtggcgtataacaccgttatccatggcttctttaaggaaggccatgtaagcaaggcctgcaatctgttccatgaaatggcgcagcagggcgttaagcctaatgtggtgacatataactcagttatcgatgcgctgtgcaaggccagagccatggacaaggcagaggtggtccttcgtcagatgattgatgatggtgttggacctgataatgtgacgtatagtagcctcatccatggatattcctcttcaggccactggaaggaggcagttagggtattcaaagagatgacaagtcggagggttacagcagatgtgcatacttacaacatgtttatgacctttctttgcaaacatggaagaagcaaagaagctgcaggaatttttgataccatggctatcaagggcctgaaacctgacaacgtttcatatgctattctccttcatgggtatgccgccgaaggatgcttagttgatatgattaatctcttcaattcaatggaaagagattgtattctacctgactgtcgtatcttcaacatactgattaatgcatatgctaaatctgggaagcttgataaggctatgcttatcttcaatgaaatgcagaaacaaggagtgagtccaaatgcagtcacatattcaaccgtaatacatgcattttgcaagaagggtaggttggatgatgctgtgataaagtttaatcagatgattgatacaggagtacgaccggacgcatctgtttatcgtcccctaatccagggtttttgtacacatggcgatttggtgaaagcaaaggaatatgttactgaaatgatgaagaaaggtatgcctcctcctgatattatgttcttcagttcaatcatgcagaacctatgcacagaaggaagggtaacagaagcacgggatatccttgacttgatagtgcacattggtatgaggcctaatgttatcatatttaatttgctgatcggtggatactgcctagtccgcaagatggcagatgcattgaaagtatttgatgatatggtgtcatatggtttagaaccttgtaactttacgtatggtatacttattaatggctattgcaaaaatagaaggattgatgacgggcttattctgttcaaagagatgctgcacaagggacttaaacctacaacttttaattataacgtcatactggatggattatttctggctggacaaactgttgctgcaaaagagaagtttgatgagatggttgaatctggagtaagtgtgtgcattgatacatactctataattcttggtggactttgtagaaatagctgcagtagcgaagcgatcacccttttccggaaattaagcgcaatgaatgtgaaatttgatattacaattgtcaatatcattattggtgccttatacagggtcgagagaaaccaagaggctaaggatttgtttgctgctatgccagccaatggcttggttcctaatgctgttacctacaccgtaatgatgacaaatcttataaaagaaggttcagtggaagaagctgacaatcttttcttatccatggagaagagtggctgtactgccaactcttgcctgttaaatcatatcatcagaaggttactggaaaaaggagagatagtcaaggctggaaattatatgtctaaagttgatgcaaagagctactcacttgaagctaaaactgtttcgctgctgatctctctgttttcaaggaaagggaaatatagagaacacatcaaattgcttcctacaaagtatcagtttctggaagaagcagccacagttgaatagaacgcatccatggacgtggattgaattgaaggtgtactactgctgtgctggtccgtggatcgtggctgtcatgcatggtttgctgtgtcttctacgatatgtacttccctttgttccgtatatgtacatcttcctcgtttggttcatgtattttcctttgaataataataaataaatcgggctttccatatcggatgcttttatatctgtgtgtatggagattgtggtatatggtttcatctcaagttgtttacgtcaagaactaaagatatttcctcaaaaaaaaagaactaaagatataatcaatgtcattaacataactcatttccatgaggagaggacgaaggacgaagtcataataagtagattggttgatattttataatcattcaaaactgcaggggttataagatcttcattttgtagaagttttagatcttccgaggggttctc

SEQ ID NO: 3151 - DNA, 4827 bp, Triticum aestivum
  source 1..4827: mol_type = other DNA
gtgcagcgtgacccggtcgtgcccctctctagagataatgagcattgcatgtctaagttataaaaaattaccacatattttttttgtcacacttgtttgaagtgcagtttatctatctttatacatatatttaaactttactctacgaataatataatctatagtactacaataatatcagtgttttagagaatcatataaatgaacagttagacatggtctaaaggacaattgagtattttgacaacaggactctacagttttatctttttagtgtgcatgtgttctcctttttttttgcaaatagcttcacctatataatacttcatccattttattagtacatccatttagggtttagggttaatggtttttatagactaatttttttagtacatctattttattctattttagcctctaaattaagaaaactaaaactctattttagtttttttatttaataatttagatataaaatagaataaaataaagtgactaaaaattaaacaaataccctttaagaaattaaaaaaactaaggaaacatttttcttgtttcgagtagataatgccagcctgttaaacgccgtcgacgagtctaacggacaccaaccagcgaaccagcagcgtcgcgtcgggccaagcgaagcagacggcacggcatctctgtcgctgcctctggacccctctcgagagttccgctccaccgttggacttgctccgctgtcggcatccagaaattgcgtggcggagcggcagacgtgagccggcacggcaggcggcctcctcctcctctcacggcaccggcagctacgggggattcctttcccaccgctccttcgctttcccttcctcgcccgccgtaataaatagacaccccctccacaccctctttccccaacctcgtgttgttcggagcgcacacacacacaaccagatctcccccaaatccacccgtcggcacctccgcttcaaggtacgccgctcgtcctccccccccccccctctctaccttctctagatcggcgttccggtccatggttagggcccggtagttctacttctgttcatgtttgtgttagatccgtgtttgtgttagatccgtgctgctagcgttcgtacacggatgcgacctgtacgtcagacacgttctgattgctaacttgccagtgtttctctttggggaatcctgggatggctctagccgttccgcagacgggatcgatttcatgattttttttgtttcgttgcatagggtttggtttgcccttttcctttatttcaatatatgccgtgcacttgtttgtcgggtcatcttttcatgcttttttttgtcttggttgtgatgatgtggtctggttgggcggtcgttctagatcggagtagaattaattctgtttcaaactacctggtggatttattaattttggatctgtatgtgtgtgccatacatattcatagttacgaattgaagatgatggatggaaatatcgatctaggataggtatacatgttgatgcgggttttactgatgcatatacagagatgctttttgttcgcttggttgtgatgatgtggtgtggttgggcggtcgttcattcgttctagatcggagtagaatactgtttcaaactacctggtgtatttattaattttggaactgtatgtgtgtgtcatacatcttcatagttacgagtttaagatggatggaaatatcgatctaggataggtatacatgttgatgtgggttttactgatgcatatacatgatggcatatgcagcatctattcatatgctctaaccttgagtacctatctattataataaacaagtatgttttataattattttgatcttgatatacttggatgatggcatatgcagcagctatatgtggatttttttagccctgccttcatacgctatttatttgcttggtactgtttcttttgtcgatgctcaccctgttgtttggtgttacttctgcaggtctccaccatgccccgcttctcctccaccacgccaatgtcgccaccccgcctccgcctccgcctccgactctgcgcccgccactcctcctccacctctcatccctcacgcatctgggatccccacgccgccttcgccgccgcggcacagcgggcgagctctggcacgctcactacggaggacgcacaccacctgtttgacgaattgctgcggcggggcaatcctgtccaggagcgtcccttgaataaatttctggctgccctcgcccgcgcgcccgcgtccgcatcctgctgcgatggccccgccctggcagtcaccctcttcggccgtttgtcccgagacgtcggacgacgggtggcgcagccaaatgtcttcacctatggcgtcctcatggactgctgctgccgcgcttgccgcacagatctggtgctcgccttctttggccgtctcctcaagacgggcctggaggcaaaccaagtcgtcttcaacaccctcctcaagggcctttgccacacaaagcgggcggatgaggctctggacgtgctgcttcacaggatgcctgagctgggctgcactcctaatgtggtggcgtataacaccgttatccatggcttctttaaggaaggccatgtaagcaaggcctgcaatctgttccatgaaatggcgcagcagggcgttaagcctaatgtggtgacatataactcagttattgatgcgctgtgcaaggccagagccatggacaaggcagaggtggtccttcgtcagatgattgatgatggtgttggacctgataatgtgacgtatagtagcctcatccatggatattcctcttcaggccactggaaggaggcagttagggtattcaaagagatgacaagtcggagggttacagcagatgtgcatacttacaacatgtttatgacctttctttgcaaacatggaagaagcaaagaagctgcaggaatttttgataccatggctatcaagggcctgaaacctgacaacgtttcatatgctattcgccttcatgggtatgccaccgaaggatgcctagttgacatgatcaatctcttcaattccatggcaacacactgcattctacctaactgtcatatattcaacatactgattaatgcatatgctaaatctgggaagcttgataaggctatgcttatcttcaatgaaatgcagaaacaaggagtgagtccaaatgcagtcacatattcaaccgtaatacatgcattttgcaagaagggtaggttggatgatgctgtgataaagtttaatcagatgattgatacaggagtacgaccggacgcatctgtttatcgtcccctaatccagggtttttgtacacatggcgatttggtgaaagcaaaggaatatgttactgaaatgatgaagaaaggtatgcctcctcctgatattatgttcttcagttcaatcatgcagaacctatgcacagaaggaagggtaacagaagcacgggatatccttgacttgatagtgcacattggtatgaggcctaatgttatcatatttaatttgctgatcggtggatactgcctagtccgcaagatggcagatgcattgaaagtatttgatgatatggtgtcatatggtttagaaccttgtaactttacgtatggtatacttattaatggctattgcaaaaatagaaggattgatgacgggcttattctgttcaaagagatgctgcacaagggacttaaacctacaacttttaattataacgtcatactggatggattatttctggctggacaaactgttgctgcaaaagagaagtttgatgagatggttgaatctggagtaagtgtgtgcattgatacatactctataattcttggtggactttgtagaaatagctgcagtagcgaagcgatcacccttttccggaaattaagcgcaatgaatgtgaaatttgatattacaattgtcaatatcattattggtgccttatacagggtcgagagaaaccaagaggctaaggatttgtttgctgctatgccagccaatggcttggttcctaatgctgttacctacaccgtaatgatgacaaatcttataaaagaaggttcagtggaagaagctgacaatcttttcttatccatggagaagagtggctgtactgccaactcttgcctgttaaatcatatcatcagaaggttactggaaaaaggagagatagtcaaggctggaaattatatgtctaaagttgatgcaaagagctactcacttgaagctaaaactgtttcgctgctgatctctctgttttcaaggaaagggaaatatagagaacacatcaaattgcttcctacaaagtatcagtttctggaagaagcagccacagttgaatagaacgcatccatggacgtggattgaattgaaggtgtactactgctgtgctggtccgtggatcgtggctgtcatgcatggtttgctgtgtcttctacgatatgtacttccctttgttccgtatatgtacatcttcctcgtttggttcatgtattttcctttgaataataataaataaatcgggctttccatatcggatgcttttatatctgtgtgtatggagattgtggtatatggtttcatctcaagttgtttacgtcaagaactaaagatatttcctcaaaaaaaaagaactaaagatataatcaatgtcattaacataactcatttccatgaggagaggacgaaggacgaagtcataataagtagattggttgatattttataatcattcaaaactgcaggggttataagatcttcattttgtagaagttttagatcttccgaggggttctc

SEQ ID NO: 3152 - DNA, 3630 bp, Triticum aestivum
  source 1..3630: mol_type = other DNA
gtgcagcgtgacccggtcgtgcccctctctagagataatgagcattgcatgtctaagttataaaaaattaccacatattttttttgtcacacttgtttgaagtgcagtttatctatctttatacatatatttaaactttactctacgaataatataatctatagtactacaataatatcagtgttttagagaatcatataaatgaacagttagacatggtctaaaggacaattgagtattttgacaacaggactctacagttttatctttttagtgtgcatgtgttctcctttttttttgcaaatagcttcacctatataatacttcatccattttattagtacatccatttagggtttagggttaatggtttttatagactaatttttttagtacatctattttattctattttagcctctaaattaagaaaactaaaactctattttagtttttttatttaataatttagatataaaatagaataaaataaagtgactaaaaattaaacaaataccctttaagaaattaaaaaaactaaggaaacatttttcttgtttcgagtagataatgccagcctgttaaacgccgtcgacgagtctaacggacaccaaccagcgaaccagcagcgtcgcgtcgggccaagcgaagcagacggcacggcatctctgtcgctgcctctggacccctctcgagagttccgctccaccgttggacttgctccgctgtcggcatccagaaattgcgtggcggagcggcagacgtgagccggcacggcaggcggcctcctcctcctctcacggcaccggcagctacgggggattcctttcccaccgctccttcgctttcccttcctcgcccgccgtaataaatagacaccccctccacaccctctttccccaacctcgtgttgttcggagcgcacacacacacaaccagatctcccccaaatccacccgtcggcacctccgcttcaaggtacgccgctcgtcctccccccccccccctctctaccttctctagatcggcgttccggtccatggttagggcccggtagttctacttctgttcatgtttgtgttagatccgtgtttgtgttagatccgtgctgctagcgttcgtacacggatgcgacctgtacgtcagacacgttctgattgctaacttgccagtgtttctctttggggaatcctgggatggctctagccgttccgcagacgggatcgatttcatgattttttttgtttcgttgcatagggtttggtttgcccttttcctttatttcaatatatgccgtgcacttgtttgtcgggtcatcttttcatgcttttttttgtcttggttgtgatgatgtggtctggttgggcggtcgttctagatcggagtagaattaattctgtttcaaactacctggtggatttattaattttggatctgtatgtgtgtgccatacatattcatagttacgaattgaagatgatggatggaaatatcgatctaggataggtatacatgttgatgcgggttttactgatgcatatacagagatgctttttgttcgcttggttgtgatgatgtggtgtggttgggcggtcgttcattcgttctagatcggagtagaatactgtttcaaactacctggtgtatttattaattttggaactgtatgtgtgtgtcatacatcttcatagttacgagtttaagatggatggaaatatcgatctaggataggtatacatgttgatgtgggttttactgatgcatatacatgatggcatatgcagcatctattcatatgctctaaccttgagtacctatctattataataaacaagtatgttttataattattttgatcttgatatacttggatgatggcatatgcagcagctatatgtggatttttttagccctgccttcatacgctatttatttgcttggtactgtttcttttgtcgatgctcaccctgttgtttggtgttacttctgcaggtctccaccatgcctggcttctcctccgccgcgtcaatgtcgccactgcgcctccgcctccgcctgcacgcccgccactcctccgcctcgcaaccctcacgccgccagggatgggatccccacgccgccttcgccgccgccacggagtgtgcgcgctccggcaacctcaccccggaggacgcacataacctgttcgacgaattgctgcggcagggcaatcctgtccttgggcgccccctcaacaaccttctcgccgccctcgcccgcgcgccggcgtccagcgcctgcagagatggccccgcactcgtggtcgccctcttcagccgcatatcccaaggcgcccgcctaagggtgctgcacccaacggcctgcacctacggcatcctcatggactgcagctgccgcgcacaccgcctcgatctggcgtttgccttcttcggccgtctcctcaggacgggactgaaggcaggcgtcatagaagtcaacagtctcctcaaaggactctgccacgcaaagcgggcggatgaggccatggaagtgcttcttcacaggatgcctgagctgtttataggagtacagggcacagctgtttatcgttccctaatccagggattttgtacacacggcgatttggtgaaagcaaaggaatatgttactgaaatgatgaagaaaggtatgcctcctcctgatattatgttcttcagttcaatcatgcagaacctatgcacagaaggaagggtaatagaagcacgagatatccttgacttgatagtgcgcattggtatgaggcctgatgttttcatatttaatatactgatcggtggatactgcctagtcggcaagatggaggatgcctcaaaaatatttgatgatatggtgtcatatggtttagaaccttgtaactttacgtatggtatacttattaatggctattgcaaaaataaaaggattgatgacgggcttattctgttcaaagagatgctgcgcaagggacttaaacctacaacttttaattataacgtcatactggatggattatttctggctggacaaactgttgctgcaaaagagaagtttgatgagatggttgaatctggagtaagtgtgtgcattgatacatactctatagttcttggtggactttgtagaaatagctgcagtagcgaagcgatcaccctgttctgaaacgcatccatggacgtggattgaattgaaggtgtactactgctgtgctggtccgtggatcgtggctgtcatgcatggtttgctgtgtcttctacgatatgtacttccctttgttccgtatatgtacatcttcctcgtttggttcatgtattttcctttgaataataataaataaatcgggctttccatatcggatgcttttatatctgtgtgtatggagattgtggtatatggtttcatctcaagttgtttacgtcaagaactaaagatatttcctcaaaaaaaaagaactaaagatataatcaatgtcattaacataactcatttccatgaggagaggacgaaggacgaagtcataataagtagattggttgatattttataatcattcaaaactgcaggggttataagatcttcattttgtagaagttttagatcttccgaggggttctc

SEQ ID NO: 3153 - DNA, 4083 bp, Triticum aestivum
  source 1..4083: mol_type = other DNA
gtgcagcgtgacccggtcgtgcccctctctagagataatgagcattgcatgtctaagttataaaaaattaccacatattttttttgtcacacttgtttgaagtgcagtttatctatctttatacatatatttaaactttactctacgaataatataatctatagtactacaataatatcagtgttttagagaatcatataaatgaacagttagacatggtctaaaggacaattgagtattttgacaacaggactctacagttttatctttttagtgtgcatgtgttctcctttttttttgcaaatagcttcacctatataatacttcatccattttattagtacatccatttagggtttagggttaatggtttttatagactaatttttttagtacatctattttattctattttagcctctaaattaagaaaactaaaactctattttagtttttttatttaataatttagatataaaatagaataaaataaagtgactaaaaattaaacaaataccctttaagaaattaaaaaaactaaggaaacatttttcttgtttcgagtagataatgccagcctgttaaacgccgtcgacgagtctaacggacaccaaccagcgaaccagcagcgtcgcgtcgggccaagcgaagcagacggcacggcatctctgtcgctgcctctggacccctctcgagagttccgctccaccgttggacttgctccgctgtcggcatccagaaattgcgtggcggagcggcagacgtgagccggcacggcaggcggcctcctcctcctctcacggcaccggcagctacgggggattcctttcccaccgctccttcgctttcccttcctcgcccgccgtaataaatagacaccccctccacaccctctttccccaacctcgtgttgttcggagcgcacacacacacaaccagatctcccccaaatccacccgtcggcacctccgcttcaaggtacgccgctcgtcctccccccccccccctctctaccttctctagatcggcgttccggtccatggttagggcccggtagttctacttctgttcatgtttgtgttagatccgtgtttgtgttagatccgtgctgctagcgttcgtacacggatgcgacctgtacgtcagacacgttctgattgctaacttgccagtgtttctctttggggaatcctgggatggctctagccgttccgcagacgggatcgatttcatgattttttttgtttcgttgcatagggtttggtttgcccttttcctttatttcaatatatgccgtgcacttgtttgtcgggtcatcttttcatgcttttttttgtcttggttgtgatgatgtggtctggttgggcggtcgttctagatcggagtagaattaattctgtttcaaactacctggtggatttattaattttggatctgtatgtgtgtgccatacatattcatagttacgaattgaagatgatggatggaaatatcgatctaggataggtatacatgttgatgcgggttttactgatgcatatacagagatgctttttgttcgcttggttgtgatgatgtggtgtggttgggcggtcgttcattcgttctagatcggagtagaatactgtttcaaactacctggtgtatttattaattttggaactgtatgtgtgtgtcatacatcttcatagttacgagtttaagatggatggaaatatcgatctaggataggtatacatgttgatgtgggttttactgatgcatatacatgatggcatatgcagcatctattcatatgctctaaccttgagtacctatctattataataaacaagtatgttttataattattttgatcttgatatacttggatgatggcatatgcagcagctatatgtggatttttttagccctgccttcatacgctatttatttgcttggtactgtttcttttgtcgatgctcaccctgttgtttggtgttacttctgcaggtctccaccatgcctcgcctctcctccaccacgccaatgtcaccaccacgcctccgcctccgactccgcggccgccactcctcctccacctctcatccctcacgcatctgggatccccacgccgccttcgccggcgcgacgcagcgggcgcactctggcaacctcaccccggaggacgcacaccacctgttcgacgaattgctgcggcagggcaatcctgtccaggagcgtcccttgactaactttctggctgccctcgcccgcgcgcccgcgtccgcatcctgcagcgatggccccgccctggccgtagccctcttcggtcgtttgtcccgaggcgccggacgacgcgtggcacagccaaatgtcttcacctatggcgtcctcatggactgctgctgccgcgcgtgccgcccggatctggcgctcgctttcttcggccgtctcttcaggaagggcctggaggcaaaccgagtcatcttctgcaccctcctcaagggactctgccacgcaaagcgcacagatgaggctctggacgtgctgcttcacaggatgcctgagctgggctgcacccccaacgtggtggcatataccacggtcatccacggcttctttaaggaaggccaagtaggcaaggcatgcaatctgttccatggaatggcgcagcagggcgttgcgcctaatttggtgacatataactcggttattgatgcgttgtgcaaggccaaagcaatggacaaggcagagtatttccttggtcagatggttgatgatggtgtcgtacctgataatgtgacatataatagcctcatccatggatattcctcttcaggccactggaaggaggcagttagggtattcaaagagatgacaagtcggagggttacagcagatgtgcatacttacaacatgtttatgacctttctttgcaaacatggaagaagcaaagaagctgcaggaatttttgataccatggctattaagggcctgaaacctgacaacgtttcatatgctattctccttcatgggtatgccaccgaaggatgcttagttgatatgattaatctcttcaattcaatggaaagagattgtattctacctgactgtcgtatcttcaacatactgattaatgcatatgctaaatctgggaagcttgataaggctatgcttatcttcaatgaaatgcagaaacaaggagtgagtccaaatgcagtcacatattcaaccgtaatacatacattttgcaaaaagggtaggttggatgatgctgtgataaagtttaatcagatgattgatacaggagtacgacagggcacagctgtttatggttctctaatccagggtttttgtacacacggcgatttggtgaaagcaaaggaattgcttactgaaatgatgaacaaaggtatgcttcctcctgatatcaagttcttccattcaatcatgcagaacctttgcacagaaggaagggtaatagaagcacgggatgtccttggcttgatagcgcacataggtatgaggcctgatgtttgcacatttaatatactgatcggtggatactgcctagtcggcaagatggaggatgcctcaaaaatatttgatgatatgatgtcatatggcttagaaccttctaattgttagaacgcatccatggacgtggattgaattgaaggtgtactactgctgtgctggtccgtggatcgtggctgtcatgcatggtttgctgtgtcttctacgatatgtacttccctttgttccgtatatgtacatcttcctcgtttggttcatgtattttcctttgaataataataaataaatcgggctttccatatcggatgcttttatatctgtgtgtatggagattgtggtatatggtttcatctcaagttgtttacgtcaagaactaaagatatttcctcaaaaaaaaagaactaaagatataatcaatgtcattaacataactcatttccatgaggagaggacgaaggacgaagtcataataagtagattggttgatattttataatcattcaaaactgcaggggttataagatcttcattttgtagaagttttagatcttccgaggggttctc

SEQ ID NO: 3154 - DNA, 2000 bp, Triticum aestivum
  source 1..2000: mol_type = other DNA
cgaagatggtgatgcgcggagctgggtcgcggcttgtccttctgatatcggcggttcggttcccctttgggtgcgtctgtgcttgtttctcactgtgacagagaagttgaagctacatgcggcgggggccctgcggcaatgatgactccatgagggtggcttcggcggacgatgctctccgcaggttgcactggactagcttggtgtgaggcttgcaactttctcctgtgatgctcatcaacaaaatcggagatgtcggtcctcgacgcctgcggccgatcgtttggcttggctgtcgaggtcctcgggtgccgtttgttcggaggggtcttgatgggtcgtcagcgaggaaatcggagttgcctgctcgtggagaggcgatgacgatgacattgcttgcagcctcgacggtgtcctctcgtcagcagtatgtgtgtgatcttgtcagtgccaggtcggccggagtgctctattcgatgggcgtgttttaattaaccgggcaactctcttcttcttaatcaatgaaaatggcaagtcttttacctcgtttcaaaaagagttaaatgcactggaggtcctaaaggtttcgtcggggtgtcactttagtcctatttcttccaaaatgcacctttaggtcctaattctttattaattggttcacccgaggtccttttccacgagcgctagctgaccagcacacgtgccgcattgacccacgccacatcgatagagggtctaaccgccaggcgagaagcttcgcaaagagaccccccccctcttagtggcaccctctctcctctttcacggtactttggcgacattggaggcgagcgacagaggcaaccggaggtgatctggaggtaatttgtgtgggtgcccgtgaagatgccccttctacgacggccagtgagcaatcctcctccatgttaccgtaagaaccctaatcttgtcgacgatcttctcctgtagctcttctaatatgtcataactttgccataatcaatagttgtagtccttgatttactttgatttgcataacggtgctacggacatggcaaaaaggacacaccaccagcggcaacatacccgccgaagttggagcttgcttcgccgcaccggcggcggtgctgaggatgttgccatgctcctcatcttagttgtttccttgccgaggagcttgaagttccggccatggataggtttagggaacgcgcgcgccgagagagagagcagatttggggaagaaataaagccagggactggggaatgagaagataatgtttataaggggttttctgtaaaaagaaagagcaacctacgcggcccttctgtcgatttggcatgggtcaacgcaccacacgagcaggtcaacgagcgctcgtgagaaaaaggacctagggtaaaccacttactaaagaattaggacctaaaggtgcattttggacgaaataagactaaagtgacaccctgacgaattttttaggaccttgagtgcatttaactctttcaaaaaataaagatgctaaaaaaactaaatgcttaaaaatacatttttctatgggaatacttaaaaatactagtataatttgatggcttcctagtatatttctagcgcttacaactaaatttatattcttggtctaaataaaattataatctgataaattatgtgatatgtatatagccatatgagaccataatttaattttacctgcaaaaagtaagtaatagtaatagtagtactacatactccctccgtccgaaaatacttgtcgaagaatttgatgaaaatggatgcatctagaacaagaatacatctagatacatcaatctccccgacaagtatttccgaacggagggagtactagataataagataactatccaaaaaaaaaaagataactgaaggttgccacctagcacattcacattggtacaacttggaaaagcacagccccgtcgtcctgctcccagttgagttcgcgacctacacaccggcc

SEQ ID NO: 3155 - DNA, 2000 bp, Triticum aestivum
  source 1..2000: mol_type = genomic DNA
tttcggcggacgatgctctccgcaggttgcactggactagcttggtgtgaggcttgcaactttctcctgtgatgctcatcaacaaaatcggagatgtcggtcctcgacgcctgcggccgatcatttggcttggctgtcgaggtcctcgggtgccgtttgttcggaggggtcttgatgggtcgtcagcgaggaaatcggagttgcctgctcgtggagaggcgatgacgatgacattgcagcctcgacggtgtcctctcgtcagcagtatgtgtgtgatcttgtcagtgccaggtcggctggagtgccctattcgatgggcgtgttttaattaaccgggcaactctcttcttcttaatcagtgaaaatggcaagtcttttacctcgtttcaaaaagagttaaatgcactggaggtcctaaaggtttcgtcggggtgtcactttagtcctatttcttccaaaatgcacctttaggtcctaattctttattaattggttcacccgaggtccttttccacgagcgctcgctgaccagcacacgtgccgcattgacccatgccacatcgatagagggtctaaccgccaggcgagaagcttcgcaaagagacccccccccctcttagtggcaccctctctcctctttcacggtactttggcgacattggaggcgagcgacagaggcaaccggaggtgatctggaggtaatttgtgtgggtgcccgtgaagatgccccttctatgacggccagtgagcaatcctcctccatgttaccgtaagaaccctaatcttgtcgatgatcttctcctgtagctcttctaatatgtcataactttgtcataatcaatagttgtagtccttgatttactttgatttgcataacggtgatacggacacggcaaaaaggacacaccaccagcggcaacatacccgccgaagttggagcttgcttcgccgcgccggcggcggtgctgaggatgttgccatgctcctcatcttagttgtttccttgccgaggagcttgaagttccggccatggataggtttaggggacgcgcgcgccgagagagagagcagatttggggaagaaataaagccagggactggggaatgagaagataatgtttataaggggttttctgtaaaaagaaagagcaacctacgcagcccttctgtcgatttggcatgggtcaacgcaccacacgagcaggtcaacgagcgctcgtgagaaaaaggacctagggtaaaccacttactaaagaattaggacctaaaggtgcattttggacgaaataagactaaagtgacaccctgacgaattttttaggaccttgagtgcatttaactctttcaaaaaataaagatgctaaaaaaactaaatgcttaaaaatacatttttctatgggaatacttaaaaatactagtataatttgatggcttcctagtatatttctagggcttacaactaaatttatattcttggtctaaataaaattataatctgataaattatgtgatatgaatatagccatatgagaccataatttaattttacctgcaaaaagtaagtaatagtagtagtagtactacatactccctccgtccggaaatacttgtcgaagaatttgatgaaaatggatgcatctagaacaagaatacatctagatacatcaatctccctgacaagtatttccgagcggagggagtactagataatactccctccgttcctaaataattgtctttctagctatctcaaataaactacaacatacggatgtatgtagacatgttttagagtgtagattcactcattttgttccgtatgtagtcatttgttgaaatctctagagagacaattatttaggaacggagggagtaagataactaccctaaaaaaaaagataactgaaggttgccacctagcacattcacattggtacaacttggaaaagcacagccccgtcgtcctgctcccagttgagttcgcgacctacacaccggcc

SEQ ID NO: 3156 - DNA, 4817 bp, Triticum aestivum
  source 1..4817: mol_type = other DNA
cgaagatggtgatgcgcggagctgggtcgcggcttgtccttctgatatcggcggttcggttcccctttgggtgcgtctgtgcttgtttctcactgtgacagagaagttgaagctacatgcggcgggggccctgcggcaatgatgactccatgagggtggcttcggcggacgatgctctccgcaggttgcactggactagcttggtgtgaggcttgcaactttctcctgtgatgctcatcaacaaaatcggagatgtcggtcctcgacgcctgcggccgatcgtttggcttggctgtcgaggtcctcgggtgccgtttgttcggaggggtcttgatgggtcgtcagcgaggaaatcggagttgcctgctcgtggagaggcgatgacgatgacattgcttgcagcctcgacggtgtcctctcgtcagcagtatgtgtgtgatcttgtcagtgccaggtcggccggagtgctctattcgatgggcgtgttttaattaaccgggcaactctcttcttcttaatcaatgaaaatggcaagtcttttacctcgtttcaaaaagagttaaatgcactggaggtcctaaaggtttcgtcggggtgtcactttagtcctatttcttccaaaatgcacctttaggtcctaattctttattaattggttcacccgaggtccttttccacgagcgctagctgaccagcacacgtgccgcattgacccacgccacatcgatagagggtctaaccgccaggcgagaagcttcgcaaagagaccccccccctcttagtggcaccctctctcctctttcacggtactttggcgacattggaggcgagcgacagaggcaaccggaggtgatctggaggtaatttgtgtgggtgcccgtgaagatgccccttctacgacggccagtgagcaatcctcctccatgttaccgtaagaaccctaatcttgtcgacgatcttctcctgtagctcttctaatatgtcataactttgccataatcaatagttgtagtccttgatttactttgatttgcataacggtgctacggacatggcaaaaaggacacaccaccagcggcaacatacccgccgaagttggagcttgcttcgccgcaccggcggcggtgctgaggatgttgccatgctcctcatcttagttgtttccttgccgaggagcttgaagttccggccatggataggtttagggaacgcgcgcgccgagagagagagcagatttggggaagaaataaagccagggactggggaatgagaagataatgtttataaggggttttctgtaaaaagaaagagcaacctacgcggcccttctgtcgatttggcatgggtcaacgcaccacacgagcaggtcaacgagcgctcgtgagaaaaaggacctagggtaaaccacttactaaagaattaggacctaaaggtgcattttggacgaaataagactaaagtgacaccctgacgaattttttaggaccttgagtgcatttaactctttcaaaaaataaagatgctaaaaaaactaaatgcttaaaaatacatttttctatgggaatacttaaaaatactagtataatttgatggcttcctagtatatttctagcgcttacaactaaatttatattcttggtctaaataaaattataatctgataaattatgtgatatgtatatagccatatgagaccataatttaattttacctgcaaaaagtaagtaatagtaatagtagtactacatactccctccgtccgaaaatacttgtcgaagaatttgatgaaaatggatgcatctagaacaagaatacatctagatacatcaatctccccgacaagtatttccgaacggagggagtactagataataagataactatccaaaaaaaaaaagataactgaaggttgccacctagcacattcacattggtacaacttggaaaagcacagccccgtcgtcctgctcccagttgagttcgcgacctacacaccggccatgccccgcttctcctccaccacgccaatgtcgccaccccgcctccgcctccgactctgcgcccgccactcctcctccacctctcatccctcacgcatctgggatccccacgccgccttcgccgccgcggcacagcgggcgagctctggcacgctcactacggaggacgcacaccacctgtttgacgaattgctgcggcggggcaatcctgtccaggagcgtcccttgaataaatttctggctgccctcgcccgcgcgcccgcgtccgcatcctgctgcgatggccccgccctggcagtcgccctcttcggccgtttgtcccgagacgtcggacgacgggtggcgcagccaaatgtcttcacctatggcgtcctcatggactgctgctgccgcgcttgccgcacagatctggtgctcgccttctttggccgtctcctcaagacgggcctggaggcaaaccaagtcgtcttcaacaccctcctcaagggcctttgccacacaaagcgggcggatgaggctctggacgtgctgcttcacaggatgcctgagctgggctgcactcctaatgtggtggcgtataacaccgttatccatggcttctttaaggaaggccatgtaagcaaggcctgcaatctgttccatgaaatggcgcagcagggcgttaagcctaatgtggtgacatataactcagttatcgatgcgctgtgcaaggccagagccatggacaaggcagaggtggtccttcgtcagatgattgatgatggtgttggacctgataatgtgacgtatagtagcctcatccatggatattcctcttcaggccactggaaggaggcagttagggtattcaaagagatgacaagtcggagggttacagcagatgtgcatacttacaacatgtttatgacctttctttgcaaacatggaagaagcaaagaagctgcaggaatttttgataccatggctatcaagggcctgaaacctgacaacgtttcatatgctattctccttcatgggtatgccgccgaaggatgcttagttgatatgattaatctcttcaattcaatggaaagagattgtattctacctgactgtcgtatcttcaacatactgattaatgcatatgctaaatctgggaagcttgataaggctatgcttatcttcaatgaaatgcagaaacaaggagtgagtccaaatgcagtcacatattcaaccgtaatacatgcattttgcaagaagggtaggttggatgatgctgtgataaagtttaatcagatgattgatacaggagtacgaccggacgcatctgtttatcgtcccctaatccagggtttttgtacacatggcgatttggtgaaagcaaaggaatatgttactgaaatgatgaagaaaggtatgcctcctcctgatattatgttcttcagttcaatcatgcagaacctatgcacagaaggaagggtaacagaagcacgggatatccttgacttgatagtgcacattggtatgaggcctaatgttatcatatttaatttgctgatcggtggatactgcctagtccgcaagatggcagatgcattgaaagtatttgatgatatggtgtcatatggtttagaaccttgtaactttacgtatggtatacttattaatggctattgcaaaaatagaaggattgatgacgggcttattctgttcaaagagatgctgcacaagggacttaaacctacaacttttaattataacgtcatactggatggattatttctggctggacaaactgttgctgcaaaagagaagtttgatgagatggttgaatctggagtaagtgtgtgcattgatacatactctataattcttggtggactttgtagaaatagctgcagtagcgaagcgatcacccttttccggaaattaagcgcaatgaatgtgaaatttgatattacaattgtcaatatcattattggtgccttatacagggtcgagagaaaccaagaggctaaggatttgtttgctgctatgccagccaatggcttggttcctaatgctgttacctacaccgtaatgatgacaaatcttataaaagaaggttcagtggaagaagctgacaatcttttcttatccatggagaagagcggctgtactgccaactcttgcctgttaaatcatatcatcagaaggttactggaaaaaggagagatagtcaaggctggaaattatatgtctaaagttgatgcaaagagctactcacttgaagctaaaactgtttcgctgctgatctctctgttttcaaggaaagggaaatatagagaacacatcaaattgcttcctacaaagtatcagtttctggaagaagcagccacagttgaataggcatccatggacgtggattgaattgaaggtgtactactgctgtgctggtccgtggatcgtggctgtcatgcatggtttgctgtgtcttctacgatatgtacttccctttgttccgtatatgtacatcttcctcgtttggttcatgtattttcctttgaataataataaataaatcgggctttccatatcggatgcttttatatctgtgtgtatggagattgtggtatatggtttcatctcaagttgtttacgtcaagaactaaagatatttcctcaaaaaaaaagaactaaagatataatcaatgtcattaacataactcatttccatgaggagaggacgaaggacgaagtcataataagtagattggttgatattttataatcattcaaaactgcaggggttataagatcttcattttgtagaagttttagatcttccgaggggttctc

SEQ ID NO: 3157 - DNA, 4823 bp, Triticum aestivum
  source 1..4823: mol_type = other DNA
tttcggcggacgatgctctccgcaggttgcactggactagcttggtgtgaggcttgcaactttctcctgtgatgctcatcaacaaaatcggagatgtcggtcctcgacgcctgcggccgatcatttggcttggctgtcgaggtcctcgggtgccgtttgttcggaggggtcttgatgggtcgtcagcgaggaaatcggagttgcctgctcgtggagaggcgatgacgatgacattgcagcctcgacggtgtcctctcgtcagcagtatgtgtgtgatcttgtcagtgccaggtcggctggagtgccctattcgatgggcgtgttttaattaaccgggcaactctcttcttcttaatcagtgaaaatggcaagtcttttacctcgtttcaaaaagagttaaatgcactggaggtcctaaaggtttcgtcggggtgtcactttagtcctatttcttccaaaatgcacctttaggtcctaattctttattaattggttcacccgaggtccttttccacgagcgctcgctgaccagcacacgtgccgcattgacccatgccacatcgatagagggtctaaccgccaggcgagaagcttcgcaaagagacccccccccctcttagtggcaccctctctcctctttcacggtactttggcgacattggaggcgagcgacagaggcaaccggaggtgatctggaggtaatttgtgtgggtgcccgtgaagatgccccttctatgacggccagtgagcaatcctcctccatgttaccgtaagaaccctaatcttgtcgatgatcttctcctgtagctcttctaatatgtcataactttgtcataatcaatagttgtagtccttgatttactttgatttgcataacggtgatacggacacggcaaaaaggacacaccaccagcggcaacatacccgccgaagttggagcttgcttcgccgcgccggcggcggtgctgaggatgttgccatgctcctcatcttagttgtttccttgccgaggagcttgaagttccggccatggataggtttaggggacgcgcgcgccgagagagagagcagatttggggaagaaataaagccagggactggggaatgagaagataatgtttataaggggttttctgtaaaaagaaagagcaacctacgcagcccttctgtcgatttggcatgggtcaacgcaccacacgagcaggtcaacgagcgctcgtgagaaaaaggacctagggtaaaccacttactaaagaattaggacctaaaggtgcattttggacgaaataagactaaagtgacaccctgacgaattttttaggaccttgagtgcatttaactctttcaaaaaataaagatgctaaaaaaactaaatgcttaaaaatacatttttctatgggaatacttaaaaatactagtataatttgatggcttcctagtatatttctagggcttacaactaaatttatattcttggtctaaataaaattataatctgataaattatgtgatatgaatatagccatatgagaccataatttaattttacctgcaaaaagtaagtaatagtagtagtagtactacatactccctccgtccggaaatacttgtcgaagaatttgatgaaaatggatgcatctagaacaagaatacatctagatacatcaatctccctgacaagtatttccgagcggagggagtactagataatactccctccgttcctaaataattgtctttctagctatctcaaataaactacaacatacggatgtatgtagacatgttttagagtgtagattcactcattttgttccgtatgtagtcatttgttgaaatctctagagagacaattatttaggaacggagggagtaagataactaccctaaaaaaaaagataactgaaggttgccacctagcacattcacattggtacaacttggaaaagcacagccccgtcgtcctgctcccagttgagttcgcgacctacacaccggccatgccccgcttctcctccaccacgccaatgtcgccaccccgcctccgcctccgcctccgactctgcgcccgccactcctcctccacctctcatccctcacgcatctgggatccccacgccgccttcgccgccgcggcacagcgggcgagctctggcacgctcactacggaggacgcacaccacctgtttgacgaattgctgcggcggggcaatcctgtccaggagcgtcccttgaataaatttctggctgccctcgcccgcgcgcccgcgtccgcatcctgctgcgatggccccgccctggcagtcaccctcttcggccgtttgtcccgagacgtcggacgacgggtggcgcagccaaatgtcttcacctatggcgtcctcatggactgctgctgccgcgcttgccgcacagatctggtgctcgccttctttggccgtctcctcaagacgggcctggaggcaaaccaagtcgtcttcaacaccctcctcaagggcctttgccacacaaagcgggcggatgaggctctggacgtgctgcttcacaggatgcctgagctgggctgcactcctaatgtggtggcgtataacaccgttatccatggcttctttaaggaaggccatgtaagcaaggcctgcaatctgttccatgaaatggcgcagcagggcgttaagcctaatgtggtgacatataactcagttattgatgcgctgtgcaaggccagagccatggacaaggcagaggtggtccttcgtcagatgattgatgatggtgttggacctgataatgtgacgtatagtagcctcatccatggatattcctcttcaggccactggaaggaggcagttagggtattcaaagagatgacaagtcggagggttacagcagatgtgcatacttacaacatgtttatgacctttctttgcaaacatggaagaagcaaagaagctgcaggaatttttgataccatggctatcaagggcctgaaacctgacaacgtttcatatgctattcgccttcatgggtatgccaccgaaggatgcctagttgacatgatcaatctcttcaattccatggcaacacactgcattctacctaactgtcatatattcaacatactgattaatgcatatgctaaatctgggaagcttgataaggctatgcttatcttcaatgaaatgcagaaacaaggagtgagtccaaatgcagtcacatattcaaccgtaatacatgcattttgcaagaagggtaggttggatgatgctgtgataaagtttaatcagatgattgatacaggagtacgaccggacgcatctgtttatcgtcccctaatccagggtttttgtacacatggcgatttggtgaaagcaaaggaatatgttactgaaatgatgaagaaaggtatgcctcctcctgatattatgttcttcagttcaatcatgcagaacctatgcacagaaggaagggtaacagaagcacgggatatccttgacttgatagtgcacattggtatgaggcctaatgttatcatatttaatttgctgatcggtggatactgcctagtccgcaagatggcagatgcattgaaagtatttgatgatatggtgtcatatggtttagaaccttgtaactttacgtatggtatacttattaatggctattgcaaaaatagaaggattgatgacgggcttattctgttcaaagagatgctgcacaagggacttaaacctacaacttttaattataacgtcatactggatggattatttctggctggacaaactgttgctgcaaaagagaagtttgatgagatggttgaatctggagtaagtgtgtgcattgatacatactctataattcttggtggactttgtagaaatagctgcagtagcgaagcgatcacccttttccggaaattaagcgcaatgaatgtgaaatttgatattacaattgtcaatatcattattggtgccttatacagggtcgagagaaaccaagaggctaaggatttgtttgctgctatgccagccaatggcttggttcctaatgctgttacctacaccgtaatgatgacaaatcttataaaagaaggttcagtggaagaagctgacaatcttttcttatccatggagaagagcggctgtactgccaactcttgcctgttaaatcatatcatcagaaggttactggaaaaaggagagatagtcaaggctggaaattatatgtctaaagttgatgcaaagagctactcacttgaagctaaaactgtttcgctgctgatctctctgttttcaaggaaagggaaatatagagaacacatcaaattgcttcctacaaagtatcagtttctggaagaagcagccacagttgaataggcatccatggacgtggattgaattgaaggtgtactactgctgtgctggtccgtggatcgtggctgtcatgcatggtttgctgtgtcttctacgatatgtacttccctttgttccgtatatgtacatcttcctcgtttggttcatgtattttcctttgaataataataaataaatcgggctttccatatcggatgcttttatatctgtgtgtatggagattgtggtatatggtttcatctcaagttgtttacgtcaagaactaaagatatttcctcaaaaaaaaagaactaaagatataatcaatgtcattaacataactcatttccatgaggagaggacgaaggacgaagtcataataagtagattggttgatattttataatcattcaaaactgcaggggttataagatcttcattttgtagaagttttagatcttccgaggggttctc

SEQ ID NO: 3158 - DNA, 5179 bp, Triticum aestivum
  source 1..5179: mol_type = other DNA
cgaagatggtgatgcgcggagctgggtcgcggcttgtccttctgatatcggcggttcggttcccctttgggtgcgtctgtgcttgtttctcactgtgacagagaagttgaagctacatgcggcgggggccctgcggcaatgatgactccatgagggtggcttcggcggacgatgctctccgcaggttgcactggactagcttggtgtgaggcttgcaactttctcctgtgatgctcatcaacaaaatcggagatgtcggtcctcgacgcctgcggccgatcgtttggcttggctgtcgaggtcctcgggtgccgtttgttcggaggggtcttgatgggtcgtcagcgaggaaatcggagttgcctgctcgtggagaggcgatgacgatgacattgcttgcagcctcgacggtgtcctctcgtcagcagtatgtgtgtgatcttgtcagtgccaggtcggccggagtgctctattcgatgggcgtgttttaattaaccgggcaactctcttcttcttaatcaatgaaaatggcaagtcttttacctcgtttcaaaaagagttaaatgcactggaggtcctaaaggtttcgtcggggtgtcactttagtcctatttcttccaaaatgcacctttaggtcctaattctttattaattggttcacccgaggtccttttccacgagcgctagctgaccagcacacgtgccgcattgacccacgccacatcgatagagggtctaaccgccaggcgagaagcttcgcaaagagaccccccccctcttagtggcaccctctctcctctttcacggtactttggcgacattggaggcgagcgacagaggcaaccggaggtgatctggaggtaatttgtgtgggtgcccgtgaagatgccccttctacgacggccagtgagcaatcctcctccatgttaccgtaagaaccctaatcttgtcgacgatcttctcctgtagctcttctaatatgtcataactttgccataatcaatagttgtagtccttgatttactttgatttgcataacggtgctacggacatggcaaaaaggacacaccaccagcggcaacatacccgccgaagttggagcttgcttcgccgcaccggcggcggtgctgaggatgttgccatgctcctcatcttagttgtttccttgccgaggagcttgaagttccggccatggataggtttagggaacgcgcgcgccgagagagagagcagatttggggaagaaataaagccagggactggggaatgagaagataatgtttataaggggttttctgtaaaaagaaagagcaacctacgcggcccttctgtcgatttggcatgggtcaacgcaccacacgagcaggtcaacgagcgctcgtgagaaaaaggacctagggtaaaccacttactaaagaattaggacctaaaggtgcattttggacgaaataagactaaagtgacaccctgacgaattttttaggaccttgagtgcatttaactctttcaaaaaataaagatgctaaaaaaactaaatgcttaaaaatacatttttctatgggaatacttaaaaatactagtataatttgatggcttcctagtatatttctagcgcttacaactaaatttatattcttggtctaaataaaattataatctgataaattatgtgatatgtatatagccatatgagaccataatttaattttacctgcaaaaagtaagtaatagtaatagtagtactacatactccctccgtccgaaaatacttgtcgaagaatttgatgaaaatggatgcatctagaacaagaatacatctagatacatcaatctccccgacaagtatttccgaacggagggagtactagataataagataactatccaaaaaaaaaaagataactgaaggttgccacctagcacattcacattggtacaacttggaaaagcacagccccgtcgtcctgctcccagttgagttcgcgacctacacaccggccatgccccgcttctcctccaccacgccaatgtcgccaccccgcctccgcctccgactctgcgcccgccactcctcctccacctctcatccctcacgcatctgggatccccacgccgccttcgccgccgcggcacagcgggcgagctctggcacgctcactacggaggacgcacaccacctgtttgacgaattgctgcggcggggcaatcctgtccaggagcgtcccttgaataaatttctggctgccctcgcccgcgcgcccgcgtccgcatcctgctgcgatggccccgccctggcagtcgccctcttcggccgtttgtcccgagacgtcggacgacgggtggcgcagccaaatgtcttcacctatggcgtcctcatggactgctgctgccgcgcttgccgcacagatctggtgctcgccttctttggccgtctcctcaagacgggcctggaggcaaaccaagtcgtcttcaacaccctcctcaagggcctttgccacacaaagcgggcggatgaggctctggacgtgctgcttcacaggatgcctgagctgggctgcactcctaatgtggtggcgtataacaccgttatccatggcttctttaaggaaggccatgtaagcaaggcctgcaatctgttccatgaaatggcgcagcagggcgttaagcctaatgtggtgacatataactcagttatcgatgcgctgtgcaaggccagagccatggacaaggcagaggtggtccttcgtcagatgattgatgatggtgttggacctgataatgtgacgtatagtagcctcatccatggatattcctcttcaggccactggaaggaggcagttagggtattcaaagagatgacaagtcggagggttacagcagatgtgcatacttacaacatgtttatgacctttctttgcaaacatggaagaagcaaagaagctgcaggaatttttgataccatggctatcaagggcctgaaacctgacaacgtttcatatgctattctccttcatgggtatgccgccgaaggatgcttagttgatatgattaatctcttcaattcaatggaaagagattgtattctacctgactgtcgtatcttcaacatactgattaatgcatatgctaaatctgggaagcttgataaggctatgcttatcttcaatgaaatgcagaaacaaggagtgagtccaaatgcagtcacatattcaaccgtaatacatgcattttgcaagaagggtaggttggatgatgctgtgataaagtttaatcagatgattgatacaggagtacgaccggacgcatctgtttatcgtcccctaatccagggtttttgtacacatggcgatttggtgaaagcaaaggaatatgttactgaaatgatgaagaaaggtatgcctcctcctgatattatgttcttcagttcaatcatgcagaacctatgcacagaaggaagggtaacagaagcacgggatatccttgacttgatagtgcacattggtatgaggcctaatgttatcatatttaatttgctgatcggtggatactgcctagtccgcaagatggcagatgcattgaaagtatttgatgatatggtgtcatatggtttagaaccttgtaactttacgtatggtatacttattaatggctattgcaaaaatagaaggattgatgacgggcttattctgttcaaagagatgctgcacaagggacttaaacctacaacttttaattataacgtcatactggatggattatttctggctggacaaactgttgctgcaaaagagaagtttgatgagatggttgaatctggagtaagtgtgtgcattgatacatactctataattcttggtggactttgtagaaatagctgcagtagcgaagcgatcacccttttccggaaattaagcgcaatgaatgtgaaatttgatattacaattgtcaatatcattattggtgccttatacagggtcgagagaaaccaagaggctaaggatttgtttgctgctatgccagccaatggcttggttcctaatgctgttacctacaccgtaatgatgacaaatcttataaaagaaggttcagtggaagaagctgacaatcttttcttatccatggagaagagcggctgtactgccaactcttgcctgttaaatcatatcatcagaaggttactggaaaaaggagagatagtcaaggctggaaattatatgtctaaagttgatgcaaagagctactcacttgaagctaaaactgtttcgctgctgatctctctgttttcaaggaaagggaaatatagagaacacatcaaattgcttcctacaaagtatcagtttctggaagaagcagccacagttgaatagttggtacatgatatctgaaatttaatttgcatcgcttgccatgggtccgtctgcttgtacaagaaatgcattttctatttgtaaataggaagtcagtttagaacaagccatcaggatgacgcaaagagtacaattcagttgcaccaccaataaaaaggcagaactagggctgccaaaacaacactgaatcaaaactcaaacagaaggagcagcaaacttttttttttttgaagctggacagtctgctagccaaacaactacaggagactgtcaggcggggcatgtagtggctggcgtctaagcgcctttgcttcttccaccatccatggcttagcctcacacggaatcgagtcaaccaattcccgtcggttttgggtggctcccttgaagatgcaattgttttcagcggccagatacgcatggtcagattaatcagcgagtgtgccccttctgtctggttcgagaaagaatttgaagagctgagcttgtccctgctggaaccagtttgaggttagttaatcataacagggtactagagaggtgttttattgactgttgatgtgtaatatgttatatgccatcctcttgatgattacggtgatctgtgaagaggcagcatgcaaaagtctgaatcacatatgcttatgtaattgtgttattatttgtgcagcttctagaccttttgccttgtagatggctacatggatctagttgtagcaatctgtaactgttagtgttttgtatatgctggcattgatgattagggtgacttgtgaagcatgcagaagtctgaatcgtacatgcttgtctag

SEQ ID NO: 3159 - DNA, 5201 bp, Triticum aestivum
  source 1..5201: mol_type = other DNA
tttcggcggacgatgctctccgcaggttgcactggactagcttggtgtgaggcttgcaactttctcctgtgatgctcatcaacaaaatcggagatgtcggtcctcgacgcctgcggccgatcatttggcttggctgtcgaggtcctcgggtgccgtttgttcggaggggtcttgatgggtcgtcagcgaggaaatcggagttgcctgctcgtggagaggcgatgacgatgacattgcagcctcgacggtgtcctctcgtcagcagtatgtgtgtgatcttgtcagtgccaggtcggctggagtgccctattcgatgggcgtgttttaattaaccgggcaactctcttcttcttaatcagtgaaaatggcaagtcttttacctcgtttcaaaaagagttaaatgcactggaggtcctaaaggtttcgtcggggtgtcactttagtcctatttcttccaaaatgcacctttaggtcctaattctttattaattggttcacccgaggtccttttccacgagcgctcgctgaccagcacacgtgccgcattgacccatgccacatcgatagagggtctaaccgccaggcgagaagcttcgcaaagagacccccccccctcttagtggcaccctctctcctctttcacggtactttggcgacattggaggcgagcgacagaggcaaccggaggtgatctggaggtaatttgtgtgggtgcccgtgaagatgccccttctatgacggccagtgagcaatcctcctccatgttaccgtaagaaccctaatcttgtcgatgatcttctcctgtagctcttctaatatgtcataactttgtcataatcaatagttgtagtccttgatttactttgatttgcataacggtgatacggacacggcaaaaaggacacaccaccagcggcaacatacccgccgaagttggagcttgcttcgccgcgccggcggcggtgctgaggatgttgccatgctcctcatcttagttgtttccttgccgaggagcttgaagttccggccatggataggtttaggggacgcgcgcgccgagagagagagcagatttggggaagaaataaagccagggactggggaatgagaagataatgtttataaggggttttctgtaaaaagaaagagcaacctacgcagcccttctgtcgatttggcatgggtcaacgcaccacacgagcaggtcaacgagcgctcgtgagaaaaaggacctagggtaaaccacttactaaagaattaggacctaaaggtgcattttggacgaaataagactaaagtgacaccctgacgaattttttaggaccttgagtgcatttaactctttcaaaaaataaagatgctaaaaaaactaaatgcttaaaaatacatttttctatgggaatacttaaaaatactagtataatttgatggcttcctagtatatttctagggcttacaactaaatttatattcttggtctaaataaaattataatctgataaattatgtgatatgaatatagccatatgagaccataatttaattttacctgcaaaaagtaagtaatagtagtagtagtactacatactccctccgtccggaaatacttgtcgaagaatttgatgaaaatggatgcatctagaacaagaatacatctagatacatcaatctccctgacaagtatttccgagcggagggagtactagataatactccctccgttcctaaataattgtctttctagctatctcaaataaactacaacatacggatgtatgtagacatgttttagagtgtagattcactcattttgttccgtatgtagtcatttgttgaaatctctagagagacaattatttaggaacggagggagtaagataactaccctaaaaaaaaagataactgaaggttgccacctagcacattcacattggtacaacttggaaaagcacagccccgtcgtcctgctcccagttgagttcgcgacctacacaccggccatgccccgcttctcctccaccacgccaatgtcgccaccccgcctccgcctccgcctccgactctgcgcccgccactcctcctccacctctcatccctcacgcatctgggatccccacgccgccttcgccgccgcggcacagcgggcgagctctggcacgctcactacggaggacgcacaccacctgtttgacgaattgctgcggcggggcaatcctgtccaggagcgtcccttgaataaatttctggctgccctcgcccgcgcgcccgcgtccgcatcctgctgcgatggccccgccctggcagtcaccctcttcggccgtttgtcccgagacgtcggacgacgggtggcgcagccaaatgtcttcacctatggcgtcctcatggactgctgctgccgcgcttgccgcacagatctggtgctcgccttctttggccgtctcctcaagacgggcctggaggcaaaccaagtcgtcttcaacaccctcctcaagggcctttgccacacaaagcgggcggatgaggctctggacgtgctgcttcacaggatgcctgagctgggctgcactcctaatgtggtggcgtataacaccgttatccatggcttctttaaggaaggccatgtaagcaaggcctgcaatctgttccatgaaatggcgcagcagggcgttaagcctaatgtggtgacatataactcagttattgatgcgctgtgcaaggccagagccatggacaaggcagaggtggtccttcgtcagatgattgatgatggtgttggacctgataatgtgacgtatagtagcctcatccatggatattcctcttcaggccactggaaggaggcagttagggtattcaaagagatgacaagtcggagggttacagcagatgtgcatacttacaacatgtttatgacctttctttgcaaacatggaagaagcaaagaagctgcaggaatttttgataccatggctatcaagggcctgaaacctgacaacgtttcatatgctattcgccttcatgggtatgccaccgaaggatgcctagttgacatgatcaatctcttcaattccatggcaacacactgcattctacctaactgtcatatattcaacatactgattaatgcatatgctaaatctgggaagcttgataaggctatgcttatcttcaatgaaatgcagaaacaaggagtgagtccaaatgcagtcacatattcaaccgtaatacatgcattttgcaagaagggtaggttggatgatgctgtgataaagtttaatcagatgattgatacaggagtacgaccggacgcatctgtttatcgtcccctaatccagggtttttgtacacatggcgatttggtgaaagcaaaggaatatgttactgaaatgatgaagaaaggtatgcctcctcctgatattatgttcttcagttcaatcatgcagaacctatgcacagaaggaagggtaacagaagcacgggatatccttgacttgatagtgcacattggtatgaggcctaatgttatcatatttaatttgctgatcggtggatactgcctagtccgcaagatggcagatgcattgaaagtatttgatgatatggtgtcatatggtttagaaccttgtaactttacgtatggtatacttattaatggctattgcaaaaatagaaggattgatgacgggcttattctgttcaaagagatgctgcacaagggacttaaacctacaacttttaattataacgtcatactggatggattatttctggctggacaaactgttgctgcaaaagagaagtttgatgagatggttgaatctggagtaagtgtgtgcattgatacatactctataattcttggtggactttgtagaaatagctgcagtagcgaagcgatcacccttttccggaaattaagcgcaatgaatgtgaaatttgatattacaattgtcaatatcattattggtgccttatacagggtcgagagaaaccaagaggctaaggatttgtttgctgctatgccagccaatggcttggttcctaatgctgttacctacaccgtaatgatgacaaatcttataaaagaaggttcagtggaagaagctgacaatcttttcttatccatggagaagagcggctgtactgccaactcttgcctgttaaatcatatcatcagaaggttactggaaaaaggagagatagtcaaggctggaaattatatgtctaaagttgatgcaaagagctactcacttgaagctaaaactgtttcgctgctgatctctctgttttcaaggaaagggaaatatagagaacacatcaaattgcttcctacaaagtatcagtttctggaagaagcagccacagttgaatagttggtacatgatatctgaaatttaatttgcatcgcttgccatgggtccgtctgcttgtacaagaaatgcattttctatttgtaaataggaagtcagtttagaacaagccatcaggatgacgcaaagagtacaattcagttgcaccaccaataaaaaggcagaactagggctgccaaaacaacactgaatcaaaactcaaacagaaggagcagcaaacttttttttttgaagctggacagtctgctagccaaacaactacaggagactgtcaggcggggcatgtagtggctggcgtctaagcgcctttgcttcttccaccatccatggcttagcctcacacggaatcgagtcaaccaattcccgtcggttttgggtggctcccttgaagatgcaattgttttcagcggccagatacgcatggtcagattaatcagcgagtgtgccccttctgtctggttcgagaaagaatttgaagagctgagcttgtcccagctggaaccagtttgaggttagttaatcataacagggtactagagaggtgttttattgactgttgatgtgtaatatgttatatgccatcctcttgatgattacggtgatctgtgaagaggcagcatgcaaaagtctgaatcacatatgcttatgtaattgtgttattatttgtgcagcttctagaccttttgccttgtagatggctacatggatctagttgtagcaatctgtaactgttagtgttttgtatatgctggcattgatgattagggtgacttgtgaagcatgcagaagtctgaatcatacatgcttgtctagttatttttggggctctct

SEQ ID NO: 3160 - DNA, 812 bp, Triticum aestivum
  source 1..812: mol_type = genomic DNA
ttggtacatgatatctgaaatttaatttgcatcgcttgccatgggtccgtctgcttgtacaagaaatgcattttctatttgtaaataggaagtcagtttagaacaagccatcaggatgacgcaaagagtacaattcagttgcaccaccaataaaaaggcagaactagggctgccaaaacaacactgaatcaaaactcaaacagaaggagcagcaaacttttttttttttgaagctggacagtctgctagccaaacaactacaggagactgtcaggcggggcatgtagtggctggcgtctaagcgcctttgcttcttccaccatccatggcttagcctcacacggaatcgagtcaaccaattcccgtcggttttgggtggctcccttgaagatgcaattgttttcagcggccagatacgcatggtcagattaatcagcgagtgtgccccttctgtctggttcgagaaagaatttgaagagctgagcttgtccctgctggaaccagtttgaggttagttaatcataacagggtactagagaggtgttttattgactgttgatgtgtaatatgttatatgccatcctcttgatgattacggtgatctgtgaagaggcagcatgcaaaagtctgaatcacatatgcttatgtaattgtgttattatttgtgcagcttctagaccttttgccttgtagatggctacatggatctagttgtagcaatctgtaactgttagtgttttgtatatgctggcattgatgattagggtgacttgtgaagcatgcagaagtctgaatcgtacatgcttgtctag

SEQ ID NO: 3161 - DNA, 828 bp, Triticum aestivum
  source 1..828: mol_type = genomic DNA
ttggtacatgatatctgaaatttaatttgcatcgcttgccatgggtccgtctgcttgtacaagaaatgcattttctatttgtaaataggaagtcagtttagaacaagccatcaggatgacgcaaagagtacaattcagttgcaccaccaataaaaaggcagaactagggctgccaaaacaacactgaatcaaaactcaaacagaaggagcagcaaacttttttttttgaagctggacagtctgctagccaaacaactacaggagactgtcaggcggggcatgtagtggctggcgtctaagcgcctttgcttcttccaccatccatggcttagcctcacacggaatcgagtcaaccaattcccgtcggttttgggtggctcccttgaagatgcaattgttttcagcggccagatacgcatggtcagattaatcagcgagtgtgccccttctgtctggttcgagaaagaatttgaagagctgagcttgtcccagctggaaccagtttgaggttagttaatcataacagggtactagagaggtgttttattgactgttgatgtgtaatatgttatatgccatcctcttgatgattacggtgatctgtgaagaggcagcatgcaaaagtctgaatcacatatgcttatgtaattgtgttattatttgtgcagcttctagaccttttgccttgtagatggctacatggatctagttgtagcaatctgtaactgttagtgttttgtatatgctggcattgatgattagggtgacttgtgaagcatgcagaagtctgaatcatacatgcttgtctagttatttttggggctctct

SEQ ID NO: 3162 - DNA, 1837 bp, Triticum aestivum
  source 1..1837: mol_type = genomic DNA
tttcggcggacgatgctctccgcaggttgcactggactagcttggtgtgaggcttgcaactttctcctgtgatgctcatcaacaaaatcggagatgtcggtcctcgacgcctgcggccgatcatttggcttggctgtcgaggtcctcgggtgccgtttgttcggaggggtcttgatgggtcgtcagcgaggaaatcggagttgcctgctcgtggagaggcgatgacgatgacattgcagcctcgacggtgtcctctcgtcagcagtatgtgtgtgatcttgtcagtgccaggtcggctggagtgccctattcgatgggcgtgttttaattaaccgggcaactctcttcttcttaatcagtgaaaatggcaagtcttttacctcgtttcaaaaagagttaaatgcactggaggtcctaaaggtttcgtcggggtgtcactttagtcctatttcttccaaaatgcacctttaggtcctaattctttattaattggttcacccgaggtccttttccacgagcgctcgctgaccagcacacgtgccgcattgacccatgccacatcgatagagggtctaaccgccaggcgagaagcttcgcaaagagacccccccccctcttagtggcaccctctctcctctttcacggtactttggcgacattggaggcgagcgacagaggcaaccggaggtgatctggaggtaatttgtgtgggtgcccgtgaagatgccccttctatgacggccagtgagcaatcctcctccatgttaccgtaagaaccctaatcttgtcgatgatcttctcctgtagctcttctaatatgtcataactttgtcataatcaatagttgtagtccttgatttactttgatttgcataacggtgatacggacacggcaaaaaggacacaccaccagcggcaacatacccgccgaagttggagcttgcttcgccgcgccggcggcggtgctgaggatgttgccatgctcctcatcttagttgtttccttgccgaggagcttgaagttccggccatggataggtttaggggacgcgcgcgccgagagagagagcagatttggggaagaaataaagccagggactggggaatgagaagataatgtttataaggggttttctgtaaaaagaaagagcaacctacgcagcccttctgtcgatttggcatgggtcaacgcaccacacgagcaggtcaacgagcgctcgtgagaaaaaggacctagggtaaaccacttactaaagaattaggacctaaaggtgcattttggacgaaataagactaaagtgacaccctgacgaattttttaggaccttgagtgcatttaactctttcaaaaaataaagatgctaaaaaaactaaatgcttaaaaatacatttttctatgggaatacttaaaaatactagtataatttgatggcttcctagtatatttctagggcttacaactaaatttatattcttggtctaaataaaattataatctgataaattatgtgatatgaatatagccatatgagaccataatttaattttacctgcaaaaagtaagtaatagtagtagtagtactacatactccctccgtccggaaatacttgtcgaagaatttgatgaaaatggatgcatctagaacaagaatacatctagatacatcaatctccctgacaagtatttccgagcggagggagtactagataataagataactaccctaaaaaaaaagataactgaaggttgccacctagcacattcacattggtacaacttggaaaagcacagccccgtcgtcctgctcccagttgagttcgcgacctacacaccggcc

SEQ ID NO: 3163 - DNA, 4660 bp, Triticum aestivum
  source 1..4660: mol_type = other DNA
tttcggcggacgatgctctccgcaggttgcactggactagcttggtgtgaggcttgcaactttctcctgtgatgctcatcaacaaaatcggagatgtcggtcctcgacgcctgcggccgatcatttggcttggctgtcgaggtcctcgggtgccgtttgttcggaggggtcttgatgggtcgtcagcgaggaaatcggagttgcctgctcgtggagaggcgatgacgatgacattgcagcctcgacggtgtcctctcgtcagcagtatgtgtgtgatcttgtcagtgccaggtcggctggagtgccctattcgatgggcgtgttttaattaaccgggcaactctcttcttcttaatcagtgaaaatggcaagtcttttacctcgtttcaaaaagagttaaatgcactggaggtcctaaaggtttcgtcggggtgtcactttagtcctatttcttccaaaatgcacctttaggtcctaattctttattaattggttcacccgaggtccttttccacgagcgctcgctgaccagcacacgtgccgcattgacccatgccacatcgatagagggtctaaccgccaggcgagaagcttcgcaaagagacccccccccctcttagtggcaccctctctcctctttcacggtactttggcgacattggaggcgagcgacagaggcaaccggaggtgatctggaggtaatttgtgtgggtgcccgtgaagatgccccttctatgacggccagtgagcaatcctcctccatgttaccgtaagaaccctaatcttgtcgatgatcttctcctgtagctcttctaatatgtcataactttgtcataatcaatagttgtagtccttgatttactttgatttgcataacggtgatacggacacggcaaaaaggacacaccaccagcggcaacatacccgccgaagttggagcttgcttcgccgcgccggcggcggtgctgaggatgttgccatgctcctcatcttagttgtttccttgccgaggagcttgaagttccggccatggataggtttaggggacgcgcgcgccgagagagagagcagatttggggaagaaataaagccagggactggggaatgagaagataatgtttataaggggttttctgtaaaaagaaagagcaacctacgcagcccttctgtcgatttggcatgggtcaacgcaccacacgagcaggtcaacgagcgctcgtgagaaaaaggacctagggtaaaccacttactaaagaattaggacctaaaggtgcattttggacgaaataagactaaagtgacaccctgacgaattttttaggaccttgagtgcatttaactctttcaaaaaataaagatgctaaaaaaactaaatgcttaaaaatacatttttctatgggaatacttaaaaatactagtataatttgatggcttcctagtatatttctagggcttacaactaaatttatattcttggtctaaataaaattataatctgataaattatgtgatatgaatatagccatatgagaccataatttaattttacctgcaaaaagtaagtaatagtagtagtagtactacatactccctccgtccggaaatacttgtcgaagaatttgatgaaaatggatgcatctagaacaagaatacatctagatacatcaatctccctgacaagtatttccgagcggagggagtactagataataagataactaccctaaaaaaaaagataactgaaggttgccacctagcacattcacattggtacaacttggaaaagcacagccccgtcgtcctgctcccagttgagttcgcgacctacacaccggccatgccccgcttctcctccaccacgccaatgtcgccaccccgcctccgcctccgcctccgactctgcgcccgccactcctcctccacctctcatccctcacgcatctgggatccccacgccgccttcgccgccgcggcacagcgggcgagctctggcacgctcactacggaggacgcacaccacctgtttgacgaattgctgcggcggggcaatcctgtccaggagcgtcccttgaataaatttctggctgccctcgcccgcgcgcccgcgtccgcatcctgctgcgatggccccgccctggcagtcaccctcttcggccgtttgtcccgagacgtcggacgacgggtggcgcagccaaatgtcttcacctatggcgtcctcatggactgctgctgccgcgcttgccgcacagatctggtgctcgccttctttggccgtctcctcaagacgggcctggaggcaaaccaagtcgtcttcaacaccctcctcaagggcctttgccacacaaagcgggcggatgaggctctggacgtgctgcttcacaggatgcctgagctgggctgcactcctaatgtggtggcgtataacaccgttatccatggcttctttaaggaaggccatgtaagcaaggcctgcaatctgttccatgaaatggcgcagcagggcgttaagcctaatgtggtgacatataactcagttattgatgcgctgtgcaaggccagagccatggacaaggcagaggtggtccttcgtcagatgattgatgatggtgttggacctgataatgtgacgtatagtagcctcatccatggatattcctcttcaggccactggaaggaggcagttagggtattcaaagagatgacaagtcggagggttacagcagatgtgcatacttacaacatgtttatgacctttctttgcaaacatggaagaagcaaagaagctgcaggaatttttgataccatggctatcaagggcctgaaacctgacaacgtttcatatgctattcgccttcatgggtatgccaccgaaggatgcctagttgacatgatcaatctcttcaattccatggcaacacactgcattctacctaactgtcatatattcaacatactgattaatgcatatgctaaatctgggaagcttgataaggctatgcttatcttcaatgaaatgcagaaacaaggagtgagtccaaatgcagtcacatattcaaccgtaatacatgcattttgcaagaagggtaggttggatgatgctgtgataaagtttaatcagatgattgatacaggagtacgaccggacgcatctgtttatcgtcccctaatccagggtttttgtacacatggcgatttggtgaaagcaaaggaatatgttactgaaatgatgaagaaaggtatgcctcctcctgatattatgttcttcagttcaatcatgcagaacctatgcacagaaggaagggtaacagaagcacgggatatccttgacttgatagtgcacattggtatgaggcctaatgttatcatatttaatttgctgatcggtggatactgcctagtccgcaagatggcagatgcattgaaagtatttgatgatatggtgtcatatggtttagaaccttgtaactttacgtatggtatacttattaatggctattgcaaaaatagaaggattgatgacgggcttattctgttcaaagagatgctgcacaagggacttaaacctacaacttttaattataacgtcatactggatggattatttctggctggacaaactgttgctgcaaaagagaagtttgatgagatggttgaatctggagtaagtgtgtgcattgatacatactctataattcttggtggactttgtagaaatagctgcagtagcgaagcgatcacccttttccggaaattaagcgcaatgaatgtgaaatttgatattacaattgtcaatatcattattggtgccttatacagggtcgagagaaaccaagaggctaaggatttgtttgctgctatgccagccaatggcttggttcctaatgctgttacctacaccgtaatgatgacaaatcttataaaagaaggttcagtggaagaagctgacaatcttttcttatccatggagaagagcggctgtactgccaactcttgcctgttaaatcatatcatcagaaggttactggaaaaaggagagatagtcaaggctggaaattatatgtctaaagttgatgcaaagagctactcacttgaagctaaaactgtttcgctgctgatctctctgttttcaaggaaagggaaatatagagaacacatcaaattgcttcctacaaagtatcagtttctggaagaagcagccacagttgaataggcatccatggacgtggattgaattgaaggtgtactactgctgtgctggtccgtggatcgtggctgtcatgcatggtttgctgtgtcttctacgatatgtacttccctttgttccgtatatgtacatcttcctcgtttggttcatgtattttcctttgaataataataaataaatcgggctttccatatcggatgcttttatatctgtgtgtatggagattgtggtatatggtttcatctcaagttgtttacgtcaagaactaaagatatttcctcaaaaaaaaagaactaaagatataatcaatgtcattaacataactcatttccatgaggagaggacgaaggacgaagtcataataagtagattggttgatattttataatcattcaaaactgcaggggttataagatcttcattttgtagaagttttagatcttccgaggggttctc

SEQ ID NO: 3164 - DNA, 3822 bp, Triticum aestivum
  source 1..3822: mol_type = other DNA
atgagcaagctggagaagttcaccaactgctactccctgagcaagaccctcaggttcaaggccatcccagtgggcaagacccaagagaacatcgacaacaagaggctgctcgtggaggacgagaagagggccgaggactacaagggcgtgaagaagctcctggaccgctactacctgtccttcatcaacgacgtcctgcactccatcaagctcaagaacctcaacaactacatctccctcttcaggaagaagaccaggaccgagaaggagaacaaggagctggagaacctggagatcaacctccgcaaggagatcgccaaggccttcaagggcaacgagggctacaagtccctcttcaagaaggacatcatcgagaccatcctcccagagttcctcgacgacaaggacgagatcgccctcgtcaactccttcaacggcttcaccaccgccttcaccggcttcttcgacaaccgcgagaatatgttctccgaggaagccaagtccacctccatcgccttcaggtgcatcaacgagaacctcacccgctacatcagcaacatggacatcttcgagaaggtcgacgccatcttcgacaagcacgaggtccaggagatcaaggagaagatcctgaacagcgactacgacgtcgaggacttcttcgagggcgagttcttcaacttcgtgctgacccaagagggcatcgacgtgtacaacgccatcatcggcggcttcgtgaccgagtccggcgagaagatcaagggcctcaacgagtacatcaacctctacaaccagaagaccaagcagaagctcccaaagttcaagccactgtacaagcaagtcctcagcgaccgcgagtccctgagcttctacggcgagggctacacctccgacgaggaagtgctggaggtgttcaggaacaccctcaacaagaactccgagatcttctccagcatcaagaagctggagaaactgttcaagaacttcgacgagtactccagcgccggcatcttcgtgaagaacggcccagccatctccaccatctccaaggacatcttcggcgagtggaacgtcatccgcgacaagtggaacgccgagtacgacgacatccacctgaagaagaaggccgtcgtgaccgagaagtacgaggacgaccgccgcaagagcttcaagaagatcggctccttcagcctggagcaactccaggagtacgccgacgccgacctctccgtcgtggagaagctcaaggagatcatcatccaaaaggtggacgagatctacaaggtgtacggcagctccgagaaactgttcgacgccgacttcgtgctggagaagtccctcaagaagaacgacgccgtggtcgccatcatgaaggacctgctcgactccgtcaagagcttcgagaactacatcaaggccttcttcggcgagggcaaggagaccaacagggacgagtccttctacggcgacttcgtcctcgcctacgacatcctcctgaaggtcgaccacatctacgacgccatcaggaactacgtgacccaaaagccatacagcaaggacaagttcaagctctacttccagaacccacaattcatgggcggctgggacaaggacaaggagaccgactacagggccaccatcctccgctacggcagcaagtactacctggccatcatggacaagaagtacgccaagtgcctccagaagatcgacaaggacgacgtgaacggcaactacgagaagatcaactacaagctgctcccaggcccaaacaagatgctcccaaaggtgttcttctccaagaagtggatggcctactacaacccaagcgaggacatccaaaagatctacaagaacggcaccttcaagaagggcgacatgttcaacctcaacgactgccacaagctcatcgacttcttcaaggactccatcagccgctacccaaagtggagcaacgcctacgacttcaacttctccgagaccgagaagtacaaggacatcgccggcttctacagggaggtcgaggagcaaggctacaaggtgtccttcgagtccgccagcaagaaggaagtggacaagctcgtggaggaaggcaagctgtacatgttccagatctacaacaaggacttctccgacaagagccacggcaccccaaacctccacaccatgtacttcaagctcctgttcgacgagaacaaccacggccaaatcaggctctccggcggcgccgagctgttcatgcgcagggccagcctcaagaaggaggagctcgtcgtgcacccagccaacagcccaatcgccaacaagaacccagacaacccaaagaagaccaccaccctctcctacgacgtgtacaaggacaagaggttcagcgaggaccaatacgagctgcacatcccaatcgccatcaacaagtgcccaaagaatatcttcaagatcaacaccgaggtgcgcgtcctgctcaagcacgacgacaacccatacgtcatcggcatcgacaggggcgagcgcaacctgctctacatcgtggtcgtggacggcaagggcaacatcgtggagcaatacagcctcaacgagatcatcaacaacttcaacggcatcaggatcaagaccgactaccactccctgctcgacaagaaggagaaggagaggttcgaggccaggcaaaactggacctccatcgagaacatcaaggagctgaaggccggctacatctcccaggtggtccacaagatctgcgagctcgtggagaagtacgacgccgtgatcgccctggaggacctcaacagcggcttcaagaacagccgcgtcaaggtggagaagcaagtctaccaaaagttcgagaagatgctgatcgacaagctgaactacatggtggacaagaagtccaacccatgcgccaccggcggcgccctcaagggctaccaaatcaccaacaagttcgagagcttcaagtccatgagcacccaaaacggcttcatcttctacatcccagcctggctcaccagcaagatcgacccatccaccggcttcgtcaacctgctcaagaccaagtacaccagcatcgccgacagcaagaagttcatctccagcttcgaccgcatcatgtatgtgccagaggaagacctcttcgagttcgccctggactacaagaacttctccaggaccgacgccgactacatcaagaagtggaagctctactcctacggcaacaggatccgcatcttcaggaacccaaagaagaacaacgtgttcgactgggaggaagtgtgcctgacctccgcctacaaggagctgttcaacaagtacggcatcaactaccagcaaggcgacatccgcgccctgctctgcgagcagagcgacaaggccttctacagctccttcatggccctgatgagcctcatgctgcaaatgcgcaactccatcaccggccgcaccgacgtggacttcctcatcagcccagtcaagaacagcgacggcatcttctacgactcccgcaactacgaggcccaagagaacgccatcctgccaaagaacgccgacgccaacggcgcctacaacatcgcccgcaaggtgctgtgggccatcggccaattcaagaaggccgaggacgagaagctggacaaggtgaagatcgccatcagcaacaaggagtggctggagtacgcccaaacctccgtgaagcacaagcgcccagccgccaccaagaaggcgggccaagccaagaagaagaagggcagctacccatacgacgtgccagactacgcctacccatacgacgtcccagactacgcctacccatacgacgtgccagactacgcctga

SEQ ID NO: 3165 - DNA, 4104 bp, Triticum aestivum
  source 1..4104: mol_type = other DNA
atggacaagaagtacagcatcgggctcgacatcgggacgaacagcgttgggtgggcggtcatcacggacgagtacaaggttccctccaagaagttcaaggtgctggggaacaccgaccgccactccatcaagaagaacctcatcggggccctcctgttcgacagcggggagaccgctgaggctacgaggctcaagagaaccgcgaggcgcagatacacgagaaggaagaacaggatctgctacctccaagagatcttctccaacgagatggccaaggttgacgattcattcttccaccgcctggaggagtctttcctcgtggaggaggacaagaagcacgagcggcatcccatcttcgggaacatcgtcgacgaggttgcctaccacgagaagtaccctacgatctaccatctgcggaagaagctcgtggacagcaccgataaggcggacctcagactgatctacctcgccctggcgcacatgatcaagttccgcgggcatttcctgatcgagggggatctcaacccagacaactccgatgttgacaagctgttcatccaactcgtgcagacctacaaccaactcttcgaggagaacccgatcaacgcttcgggggtcgacgctaaggccatcctgtcagcccgcctctcgaagtcacgcaggctggagaacctgatcgcgcagctcccaggggagaagaagaacgggctgttcgggaacctcatcgctctctctctggggctcacgccgaacttcaagtccaacttcgatctcgccgaggacgcgaagctgcaactcagcaaggacacctacgacgatgacctcgataacctcctggcgcagatcggggatcaatacgctgacctgttcctcgccgcgaagaacctgtcggacgccatcctcctgtcagatatcctccgcgtgaacaccgagatcacgaaggccccactctctgcgtccatgatcaagcgctacgacgagcaccatcaggatctgaccctcctgaaggcgctggtccgccaacagctcccggagaagtacaaggagatcttcttcgatcagtcgaagaacgggtacgctgggtacatcgacgggggggcgtcacaagaggagttctacaagttcatcaagccaatcctggagaagatggacgggacggaggagctcctggtgaagctcaacagggaggacctcctgcggaagcagagaaccttcgataacgggtccatcccccaccaaatccatctcggggagctgcacgccatcctgagaaggcaagaggacttctaccctttcctcaaggataaccgggagaagatcgagaagatcctgaccttcagaatcccatactacgtcgggccgctcgctcgggggaacagcagattcgcctggatgacccgcaagtcggaggagaccatcacgccgtggaacttcgaggaggtggtcgacaagggggcgagcgctcagtcgttcatcgagaggatgaccaacttcgacaagaacctgcccaacgagaaggtgctccctaagcactcgctcctgtacgagtacttcaccgtctacaacgagctcacgaaggtgaagtatgtgaccgaggggatgagaaagcctgccttcctgtccggggagcagaagaaggcgatcgtggacctcctgttcaagaccaaccggaaggtcacggttaagcaactcaaggaggactacttcaagaagatcgagtgcttcgattcggtggagatctcaggggtcgaggacaggttcaacgcctccctcgggacctaccacgatctcctgaagatcatcaaggataaggacttcctggacaacgaggagaacgaggacatcctggaggacatcgtgctgaccctcacgctgttcgaggacagggagatgatcgaggagcgcctgaagacgtacgcccatctcttcgatgacaaggtcatgaagcaactcaagagaagaagatacaccgggtgggggaggctgtcccgcaagctcatcaacgggatccgggacaagcagtcagggaagaccatcctcgacttcctgaagtctgatgggttcgccaacaggaacttcatgcaactgatccacgatgactcactcaccttcaaggaggatatccaaaaggctcaggtgagcgggcagggggactcgctgcacgagcatatcgctaacctcgctgggtcccctgcgatcaagaaggggatcctgcagaccgtgaaggttgtggacgagctcgtgaaggtcatggggcggcataagcctgagaacatcgtcatcgagatggccagagagaaccaaaccacgcagaaggggcaaaagaactctagggagcgcatgaagcgcatcgaggaggggatcaaggagctggggtcccaaatcctcaaggagcacccagttgagaacacccaactgcagaacgagaagctctacctgtactacctccagaacgggagggatatgtatgtggaccaagagctggatatcaaccgcctcagcgattacgacgttgatcatatcgtgccccagtctttcctgaaggatgactccatcgacaacaaggtcctcaccaggtcggacaagaaccgcgggaagtcagataacgttccatctgaggaggtcgttaagaagatgaagaactactggaggcagctcctgaacgccaagctgatcacgcaaaggaagttcgacaacctcaccaaggctgagagaggggggctctcagagctggacaaggctgggttcatcaagcggcagctggtcgagaccagacaaatcacgaagcacgttgcgcaaatcctcgactctcggatgaacacgaagtacgatgagaacgacaagctgatcagggaggtgaaggtcatcaccctgaagtctaagctcgtctccgacttccgcaaggacttccagttctacaaggttcgcgagatcaacaactaccaccatgcgcatgacgcttacctcaacgctgtggtcgggaccgccctgatcaagaagtacccgaagctggagagcgagttcgtgtacggggactacaaggtttacgatgtgcgcaagatgatcgccaagtcggagcaagagatcgggaaggccaccgccaagtacttcttctactcaaacatcatgaacttctttaagaccgagatcacgctggccaacggggagatccggaagagacccctcatcgagaccaacggggagacgggggagatcgtgtgggacaaggggagggatttcgcgaccgtccgcaaggttctctccatgccccaggtgaacatcgtcaagaagaccgaggtccaaacgggggggttctcaaaggagtctatcctgcctaagcggaacagcgacaagctcatcgccagaaagaaggactgggatccaaagaagtacggggggttcgacagccctaccgtcgcgtactcggttctggttgtggctaaggttgagaaggggaagtccaagaagctcaagagcgtgaaggagctcctggggatcaccatcatggagcgctccagcttcgagaagaacccaatcgacttcctggaggccaaggggtacaaggaggtgaagaaggacctgatcatcaagctcccgaagtactctctcttcgagctggagaacgggaggaagcgcatgctggcttccgctggggagctccaaaaggggaacgagctcgccctgccatccaagtatgtgaacttcctctacctggcgtcccactacgagaagctcaaggggagcccggaggacaacgagcaaaagcagctgttcgtcgagcagcacaagcattacctcgacgagatcatcgagcaaatctccgagttctccaagcgcgtgatcctcgcggacgctaacctggataaggtcctctccgcttacaacaagcaccgggacaagcccatcagagagcaggccgagaacatcatccatctcttcaccctgacgaacctcggggcccctgctgccttcaagtacttcgacaccacgatcgatcggaagagatacaccagcacgaaggaggtcctggacgcgaccctcatccaccaatctatcacggggctgtacgagacgagaatcgacctgtcacaactggggggggac

SEQ ID NO: 3166 - DNA, 7428 bp, Triticum aestivum
  source 1..7428: mol_type = other DNA
gaccaagcccgttattctgacagttctggtgctcaacacatttatatttatcaaggagcacattgttactcactgctaggagggaatcgaactaggaatattgatcagaggaactacgagagagctgaagataactgccctctagctctcactgatctgggtcgcatagtgagatgcagcccacgtgagttcagcaacggtctagcgctgggcttttaggcccgcatgatcgggcttttgtcgggtggtcgacgtgttcacgattggggagagcaacgcagcagttcctcttagtttagtcccacctcgcctgtccagcagagttctgaccggtttataaactcgcttgctgcatcagacttggaaagacaattatttaggaagttttagagctagaaatagcaagttaaaataaggctagtccgttatcaacttgaaaaagtggcaccgagtcggtgctttttttgaccaagcccgttattctgacagttctggtgctcaacacatttatatttatcaaggagcacattgttactcactgctaggagggaatcgaactaggaatattgatcagaggaactacgagagagctgaagataactgccctctagctctcactgatctgggtcgcatagtgagatgcagcccacgtgagttcagcaacggtctagcgctgggcttttaggcccgcatgatcgggcttttgtcgggtggtcgacgtgttcacgattggggagagcaacgcagcagttcctcttagtttagtcccacctcgcctgtccagcagagttctgaccggtttataaactcgcttgctgcatcagacttggacaattatttaggaacggagttttagagctagaaatagcaagttaaaataaggctagtccgttatcaacttgaaaaagtggcaccgagtcggtgctttttttgtgtggcaaacagctattatgggtattatgggtggagtgcagcgtgacccggtcgtgcccctctctagagataatgagcattgcatgtctaagttataaaaaattaccacatattttttttgtcacacttgtttgaagtgcagtttatctatctttatacatatatttaaactttactctacgaataatataatctatagtactacaataatatcagtgttttagagaatcatataaatgaacagttagacatggtctaaaggacaattgagtattttgacaacaggactctacagttttatctttttagtgtgcatgtgttctcctttttttttgcaaatagcttcacctatataatacttcatccattttattagtacatccatttagggtttagggttaatggtttttatagactaatttttttagtacatctattttattctattttagcctctaaattaagaaaactaaaactctattttagtttttttatttaataatttagatataaaatagaataaaataaagtgactaaaaattaaacaaataccctttaagaaattaaaaaaactaaggaaacatttttcttgtttcgagtagataatgccagcctgttaaacgccgtcgacgagtctaacggacaccaaccagcgaaccagcagcgtcgcgtcgggccaagcgaagcagacggcacggcatctctgtcgctgcctctggacccctctcgagagttccgctccaccgttggacttgctccgctgtcggcatccagaaattgcgtggcggagcggcagacgtgagccggcacggcaggcggcctcctcctcctctcacggcaccggcagctacgggggattcctttcccaccgctccttcgctttcccttcctcgcccgccgtaataaatagacaccccctccacaccctctttccccaacctcgtgttgttcggagcgcacacacacacaaccagatctcccccaaatccacccgtcggcacctccgcttcaaggtacgccgctcgtcctccccccccccccctctctaccttctctagatcggcgttccggtccatggttagggcccggtagttctacttctgttcatgtttgtgttagatccgtgtttgtgttagatccgtgctgctagcgttcgtacacggatgcgacctgtacgtcagacacgttctgattgctaacttgccagtgtttctctttggggaatcctgggatggctctagccgttccgcagacgggatcgatttcatgattttttttgtttcgttgcatagggtttggtttgcccttttcctttatttcaatatatgccgtgcacttgtttgtcgggtcatcttttcatgcttttttttgtcttggttgtgatgatgtggtctggttgggcggtcgttctagatcggagtagaattaattctgtttcaaactacctggtggatttattaattttggatctgtatgtgtgtgccatacatattcatagttacgaattgaagatgatggatggaaatatcgatctaggataggtatacatgttgatgcgggttttactgatgcatatacagagatgctttttgttcgcttggttgtgatgatgtggtgtggttgggcggtcgttcattcgttctagatcggagtagaatactgtttcaaactacctggtgtatttattaattttggaactgtatgtgtgtgtcatacatcttcatagttacgagtttaagatggatggaaatatcgatctaggataggtatacatgttgatgtgggttttactgatgcatatacatgatggcatatgcagcatctattcatatgctctaaccttgagtacctatctattataataaacaagtatgttttataattattttgatcttgatatacttggatgatggcatatgcagcagctatatgtggatttttttagccctgccttcatacgctatttatttgcttggtactgtttcttttgtcgatgctcaccctgttgtttggtgttacttctgcaggtctccaccatggctcctaagaagaagcgcaaggttgggatccacggggttccggcggctatggacaagaagtacagcatcgggctcgacatcgggacgaacagcgttgggtgggcggtcatcacggacgagtacaaggttccctccaagaagttcaaggtgctggggaacaccgaccgccactccatcaagaagaacctcatcggggccctcctgttcgacagcggggagaccgctgaggctacgaggctcaagagaaccgcgaggcgcagatacacgagaaggaagaacaggatctgctacctccaagagatcttctccaacgagatggccaaggttgacgattcattcttccaccgcctggaggagtctttcctcgtggaggaggacaagaagcacgagcggcatcccatcttcgggaacatcgtcgacgaggttgcctaccacgagaagtaccctacgatctaccatctgcggaagaagctcgtggacagcaccgataaggcggacctcagactgatctacctcgccctggcgcacatgatcaagttccgcgggcatttcctgatcgagggggatctcaacccagacaactccgatgttgacaagctgttcatccaactcgtgcagacctacaaccaactcttcgaggagaacccgatcaacgcttcgggggtcgacgctaaggccatcctgtcagcccgcctctcgaagtcacgcaggctggagaacctgatcgcgcagctcccaggggagaagaagaacgggctgttcgggaacctcatcgctctctctctggggctcacgccgaacttcaagtccaacttcgatctcgccgaggacgcgaagctgcaactcagcaaggacacctacgacgatgacctcgataacctcctggcgcagatcggggatcaatacgctgacctgttcctcgccgcgaagaacctgtcggacgccatcctcctgtcagatatcctccgcgtgaacaccgagatcacgaaggccccactctctgcgtccatgatcaagcgctacgacgagcaccatcaggatctgaccctcctgaaggcgctggtccgccaacagctcccggagaagtacaaggagatcttcttcgatcagtcgaagaacgggtacgctgggtacatcgacgggggggcgtcacaagaggagttctacaagttcatcaagccaatcctggagaagatggacgggacggaggagctcctggtgaagctcaacagggaggacctcctgcggaagcagagaaccttcgataacgggtccatcccccaccaaatccatctcggggagctgcacgccatcctgagaaggcaagaggacttctaccctttcctcaaggataaccgggagaagatcgagaagatcctgaccttcagaatcccatactacgtcgggccgctcgctcgggggaacagcagattcgcctggatgacccgcaagtcggaggagaccatcacgccgtggaacttcgaggaggtggtcgacaagggggcgagcgctcagtcgttcatcgagaggatgaccaacttcgacaagaacctgcccaacgagaaggtgctccctaagcactcgctcctgtacgagtacttcaccgtctacaacgagctcacgaaggtgaagtatgtgaccgaggggatgagaaagcctgccttcctgtccggggagcagaagaaggcgatcgtggacctcctgttcaagaccaaccggaaggtcacggttaagcaactcaaggaggactacttcaagaagatcgagtgcttcgattcggtggagatctcaggggtcgaggacaggttcaacgcctccctcgggacctaccacgatctcctgaagatcatcaaggataaggacttcctggacaacgaggagaacgaggacatcctggaggacatcgtgctgaccctcacgctgttcgaggacagggagatgatcgaggagcgcctgaagacgtacgcccatctcttcgatgacaaggtcatgaagcaactcaagagaagaagatacaccgggtgggggaggctgtcccgcaagctcatcaacgggatccgggacaagcagtcagggaagaccatcctcgacttcctgaagtctgatgggttcgccaacaggaacttcatgcaactgatccacgatgactcactcaccttcaaggaggatatccaaaaggctcaggtgagcgggcagggggactcgctgcacgagcatatcgctaacctcgctgggtcccctgcgatcaagaaggggatcctgcagaccgtgaaggttgtggacgagctcgtgaaggtcatggggcggcataagcctgagaacatcgtcatcgagatggccagagagaaccaaaccacgcagaaggggcaaaagaactctagggagcgcatgaagcgcatcgaggaggggatcaaggagctggggtcccaaatcctcaaggagcacccagttgagaacacccaactgcagaacgagaagctctacctgtactacctccagaacgggagggatatgtatgtggaccaagagctggatatcaaccgcctcagcgattacgacgttgatcatatcgtgccccagtctttcctgaaggatgactccatcgacaacaaggtcctcaccaggtcggacaagaaccgcgggaagtcagataacgttccatctgaggaggtcgttaagaagatgaagaactactggaggcagctcctgaacgccaagctgatcacgcaaaggaagttcgacaacctcaccaaggctgagagaggggggctctcagagctggacaaggctgggttcatcaagcggcagctggtcgagaccagacaaatcacgaagcacgttgcgcaaatcctcgactctcggatgaacacgaagtacgatgagaacgacaagctgatcagggaggtgaaggtcatcaccctgaagtctaagctcgtctccgacttccgcaaggacttccagttctacaaggttcgcgagatcaacaactaccaccatgcgcatgacgcttacctcaacgctgtggtcgggaccgccctgatcaagaagtacccgaagctggagagcgagttcgtgtacggggactacaaggtttacgatgtgcgcaagatgatcgccaagtcggagcaagagatcgggaaggccaccgccaagtacttcttctactcaaacatcatgaacttctttaagaccgagatcacgctggccaacggggagatccggaagagacccctcatcgagaccaacggggagacgggggagatcgtgtgggacaaggggagggatttcgcgaccgtccgcaaggttctctccatgccccaggtgaacatcgtcaagaagaccgaggtccaaacgggggggttctcaaaggagtctatcctgcctaagcggaacagcgacaagctcatcgccagaaagaaggactgggatccaaagaagtacggggggttcgacagccctaccgtcgcgtactcggttctggttgtggctaaggttgagaaggggaagtccaagaagctcaagagcgtgaaggagctcctggggatcaccatcatggagcgctccagcttcgagaagaacccaatcgacttcctggaggccaaggggtacaaggaggtgaagaaggacctgatcatcaagctcccgaagtactctctcttcgagctggagaacgggaggaagcgcatgctggcttccgctggggagctccaaaaggggaacgagctcgccctgccatccaagtatgtgaacttcctctacctggcgtcccactacgagaagctcaaggggagcccggaggacaacgagcaaaagcagctgttcgtcgagcagcacaagcattacctcgacgagatcatcgagcaaatctccgagttctccaagcgcgtgatcctcgcggacgctaacctggataaggtcctctccgcttacaacaagcaccgggacaagcccatcagagagcaggccgagaacatcatccatctcttcaccctgacgaacctcggggcccctgctgccttcaagtacttcgacaccacgatcgatcggaagagatacaccagcacgaaggaggtcctggacgcgaccctcatccaccaatctatcacggggctgtacgagacgagaatcgacctgtcacaactggggggggacaagaggccggcggcaaccaagaaggcgggccaggccaagaagaagaagtgaaacgatcgttcaaacatttggcaataaagtttcttaagattgaatcctgttgccggtcttgcgatgattatcatataatttctgttgaattacgttaagcatgtaataattaacatgtaatgcatgacgttatttatgagatgggtttttatgattagagtcccgcaattatacatttaatacgcgatagaaaacaaaatatagcgcgcaaactaggataaattatcgcgcgcggtgtcatctatgttactag

SEQ ID NO: 3167 - DNA, 7011 bp, Triticum aestivum
  source 1..7011: mol_type = other DNA
gaccaagcccgttattctgacagttctggtgctcaacacatttatatttatcaaggagcacattgttactcactgctaggagggaatcgaactaggaatattgatcagaggaactacgagagagctgaagataactgccctctagctctcactgatctgggtcgcatagtgagatgcagcccacgtgagttcagcaacggtctagcgctgggcttttaggcccgcatgatcgggcttttgtcgggtggtcgacgtgttcacgattggggagagcaacgcagcagttcctcttagtttagtcccacctcgcctgtccagcagagttctgaccggtttataaactcgcttgctgcatcagacttgtaatttctactaagtgtagatcgagcggagggagtactagataatttttttgtgctctcttaaggtagcggagaccaagcccgttattctgacagttctggtgctcaacacatttatatttatcaaggagcacattgttactcactgctaggagggaatcgaactaggaatattgatcagaggaactacgagagagctgaagataactgccctctagctctcactgatctgggtcgcatagtgagatgcagcccacgtgagttcagcaacggtctagcgctgggcttttaggcccgcatgatcgggcttttgtcgggtggtcgacgtgttcacgattggggagagcaacgcagcagttcctcttagtttagtcccacctcgcctgtccagcagagttctgaccggtttataaactcgcttgctgcatcagacttgtaatttctactaagtgtagattttgagatagctagaaagacaattttttttgtgtggcaaacagctattatgggtattatgggtggagtgcagcgtgacccggtcgtgcccctctctagagataatgagcattgcatgtctaagttataaaaaattaccacatattttttttgtcacacttgtttgaagtgcagtttatctatctttatacatatatttaaactttactctacgaataatataatctatagtactacaataatatcagtgttttagagaatcatataaatgaacagttagacatggtctaaaggacaattgagtattttgacaacaggactctacagttttatctttttagtgtgcatgtgttctcctttttttttgcaaatagcttcacctatataatacttcatccattttattagtacatccatttagggtttagggttaatggtttttatagactaatttttttagtacatctattttattctattttagcctctaaattaagaaaactaaaactctattttagtttttttatttaataatttagatataaaatagaataaaataaagtgactaaaaattaaacaaataccctttaagaaattaaaaaaactaaggaaacatttttcttgtttcgagtagataatgccagcctgttaaacgccgtcgacgagtctaacggacaccaaccagcgaaccagcagcgtcgcgtcgggccaagcgaagcagacggcacggcatctctgtcgctgcctctggacccctctcgagagttccgctccaccgttggacttgctccgctgtcggcatccagaaattgcgtggcggagcggcagacgtgagccggcacggcaggcggcctcctcctcctctcacggcaccggcagctacgggggattcctttcccaccgctccttcgctttcccttcctcgcccgccgtaataaatagacaccccctccacaccctctttccccaacctcgtgttgttcggagcgcacacacacacaaccagatctcccccaaatccacccgtcggcacctccgcttcaaggtacgccgctcgtcctccccccccccccctctctaccttctctagatcggcgttccggtccatggttagggcccggtagttctacttctgttcatgtttgtgttagatccgtgtttgtgttagatccgtgctgctagcgttcgtacacggatgcgacctgtacgtcagacacgttctgattgctaacttgccagtgtttctctttggggaatcctgggatggctctagccgttccgcagacgggatcgatttcatgattttttttgtttcgttgcatagggtttggtttgcccttttcctttatttcaatatatgccgtgcacttgtttgtcgggtcatcttttcatgcttttttttgtcttggttgtgatgatgtggtctggttgggcggtcgttctagatcggagtagaattaattctgtttcaaactacctggtggatttattaattttggatctgtatgtgtgtgccatacatattcatagttacgaattgaagatgatggatggaaatatcgatctaggataggtatacatgttgatgcgggttttactgatgcatatacagagatgctttttgttcgcttggttgtgatgatgtggtgtggttgggcggtcgttcattcgttctagatcggagtagaatactgtttcaaactacctggtgtatttattaattttggaactgtatgtgtgtgtcatacatcttcatagttacgagtttaagatggatggaaatatcgatctaggataggtatacatgttgatgtgggttttactgatgcatatacatgatggcatatgcagcatctattcatatgctctaaccttgagtacctatctattataataaacaagtatgttttataattattttgatcttgatatacttggatgatggcatatgcagcagctatatgtggatttttttagccctgccttcatacgctatttatttgcttggtactgtttcttttgtcgatgctcaccctgttgtttggtgttacttctgcaggtctccaccatgagcaagctggagaagttcaccaactgctactccctgagcaagaccctcaggttcaaggccatcccagtgggcaagacccaagagaacatcgacaacaagaggctgctcgtggaggacgagaagagggccgaggactacaagggcgtgaagaagctcctggaccgctactacctgtccttcatcaacgacgtcctgcactccatcaagctcaagaacctcaacaactacatctccctcttcaggaagaagaccaggaccgagaaggagaacaaggagctggagaacctggagatcaacctccgcaaggagatcgccaaggccttcaagggcaacgagggctacaagtccctcttcaagaaggacatcatcgagaccatcctcccagagttcctcgacgacaaggacgagatcgccctcgtcaactccttcaacggcttcaccaccgccttcaccggcttcttcgacaaccgcgagaatatgttctccgaggaagccaagtccacctccatcgccttcaggtgcatcaacgagaacctcacccgctacatcagcaacatggacatcttcgagaaggtcgacgccatcttcgacaagcacgaggtccaggagatcaaggagaagatcctgaacagcgactacgacgtcgaggacttcttcgagggcgagttcttcaacttcgtgctgacccaagagggcatcgacgtgtacaacgccatcatcggcggcttcgtgaccgagtccggcgagaagatcaagggcctcaacgagtacatcaacctctacaaccagaagaccaagcagaagctcccaaagttcaagccactgtacaagcaagtcctcagcgaccgcgagtccctgagcttctacggcgagggctacacctccgacgaggaagtgctggaggtgttcaggaacaccctcaacaagaactccgagatcttctccagcatcaagaagctggagaaactgttcaagaacttcgacgagtactccagcgccggcatcttcgtgaagaacggcccagccatctccaccatctccaaggacatcttcggcgagtggaacgtcatccgcgacaagtggaacgccgagtacgacgacatccacctgaagaagaaggccgtcgtgaccgagaagtacgaggacgaccgccgcaagagcttcaagaagatcggctccttcagcctggagcaactccaggagtacgccgacgccgacctctccgtcgtggagaagctcaaggagatcatcatccaaaaggtggacgagatctacaaggtgtacggcagctccgagaaactgttcgacgccgacttcgtgctggagaagtccctcaagaagaacgacgccgtggtcgccatcatgaaggacctgctcgactccgtcaagagcttcgagaactacatcaaggccttcttcggcgagggcaaggagaccaacagggacgagtccttctacggcgacttcgtcctcgcctacgacatcctcctgaaggtcgaccacatctacgacgccatcaggaactacgtgacccaaaagccatacagcaaggacaagttcaagctctacttccagaacccacaattcatgggcggctgggacaaggacaaggagaccgactacagggccaccatcctccgctacggcagcaagtactacctggccatcatggacaagaagtacgccaagtgcctccagaagatcgacaaggacgacgtgaacggcaactacgagaagatcaactacaagctgctcccaggcccaaacaagatgctcccaaaggtgttcttctccaagaagtggatggcctactacaacccaagcgaggacatccaaaagatctacaagaacggcaccttcaagaagggcgacatgttcaacctcaacgactgccacaagctcatcgacttcttcaaggactccatcagccgctacccaaagtggagcaacgcctacgacttcaacttctccgagaccgagaagtacaaggacatcgccggcttctacagggaggtcgaggagcaaggctacaaggtgtccttcgagtccgccagcaagaaggaagtggacaagctcgtggaggaaggcaagctgtacatgttccagatctacaacaaggacttctccgacaagagccacggcaccccaaacctccacaccatgtacttcaagctcctgttcgacgagaacaaccacggccaaatcaggctctccggcggcgccgagctgttcatgcgcagggccagcctcaagaaggaggagctcgtcgtgcacccagccaacagcccaatcgccaacaagaacccagacaacccaaagaagaccaccaccctctcctacgacgtgtacaaggacaagaggttcagcgaggaccaatacgagctgcacatcccaatcgccatcaacaagtgcccaaagaatatcttcaagatcaacaccgaggtgcgcgtcctgctcaagcacgacgacaacccatacgtcatcggcatcgacaggggcgagcgcaacctgctctacatcgtggtcgtggacggcaagggcaacatcgtggagcaatacagcctcaacgagatcatcaacaacttcaacggcatcaggatcaagaccgactaccactccctgctcgacaagaaggagaaggagaggttcgaggccaggcaaaactggacctccatcgagaacatcaaggagctgaaggccggctacatctcccaggtggtccacaagatctgcgagctcgtggagaagtacgacgccgtgatcgccctggaggacctcaacagcggcttcaagaacagccgcgtcaaggtggagaagcaagtctaccaaaagttcgagaagatgctgatcgacaagctgaactacatggtggacaagaagtccaacccatgcgccaccggcggcgccctcaagggctaccaaatcaccaacaagttcgagagcttcaagtccatgagcacccaaaacggcttcatcttctacatcccagcctggctcaccagcaagatcgacccatccaccggcttcgtcaacctgctcaagaccaagtacaccagcatcgccgacagcaagaagttcatctccagcttcgaccgcatcatgtatgtgccagaggaagacctcttcgagttcgccctggactacaagaacttctccaggaccgacgccgactacatcaagaagtggaagctctactcctacggcaacaggatccgcatcttcaggaacccaaagaagaacaacgtgttcgactgggaggaagtgtgcctgacctccgcctacaaggagctgttcaacaagtacggcatcaactaccagcaaggcgacatccgcgccctgctctgcgagcagagcgacaaggccttctacagctccttcatggccctgatgagcctcatgctgcaaatgcgcaactccatcaccggccgcaccgacgtggacttcctcatcagcccagtcaagaacagcgacggcatcttctacgactcccgcaactacgaggcccaagagaacgccatcctgccaaagaacgccgacgccaacggcgcctacaacatcgcccgcaaggtgctgtgggccatcggccaattcaagaaggccgaggacgagaagctggacaaggtgaagatcgccatcagcaacaaggagtggctggagtacgcccaaacctccgtgaagcacaagcgcccagccgccaccaagaaggcgggccaagccaagaagaagaagggcagctacccatacgacgtgccagactacgcctacccatacgacgtcccagactacgcctacccatacgacgtgccagactacgcctgaaacgcatccaatccaatatggacgattggacgtggaaggtttcctgtgtcttctacgatataataattggtcgctgtcctgtgtggatgtttcctgtgtcttctacgatatattaatgtacttctgtctgtttcgtttcgtatgtacaatcttccgggtatcgttcatgtatccctttgaataataacaaataaaatcgggtttgtcacggtaatctgaataaccttttattagccaaagtttaaccaaaattacgtattgcacgtaaaaattaagctagtttttggagagccggagacagac

SEQ ID NO: 3168 - DNA, 362 bp, Triticum aestivum
  source 1..362: mol_type = genomic DNA
gaccaagcccgttattctgacagttctggtgctcaacacatttatatttatcaaggagcacattgttactcactgctaggagggaatcgaactaggaatattgatcagaggaactacgagagagctgaagataactgccctctagctctcactgatctgggtcgcatagtgagatgcagcccacgtgagttcagcaacggtctagcgctgggcttttaggcccgcatgatcgggcttttgtcgggtggtcgacgtgttcacgattggggagagcaacgcagcagttcctcttagtttagtcccacctcgcctgtccagcagagttctgaccggtttataaactcgcttgctgcatcagactt

SEQ ID NO: 3169 - skipped

SEQ ID NO: 3170 - DNA, 300 bp, Triticum aestivum
  source 1..300: mol_type = genomic DNA
gcatccaatccaatatggacgattggacgtggaaggtttcctgtgtcttctacgatataataattggtcgctgtcctgtgtggatgtttcctgtgtcttctacgatatattaatgtacttctgtctgtttcgtttcgtatgtacaatcttccgggtatcgttcatgtatccctttgaataataacaaataaaatcgggtttgtcacggtaatctgaataaccttttattagccaaagtttaaccaaaattacgtattgcacgtaaaaattaagctagtttttggagagccggagacagac

SEQ ID NO: 3171 - DNA, 250 bp, Triticum aestivum
  source 1..250: mol_type = genomic DNA
gatcgttcaaacatttggcaataaagtttcttaagattgaatcctgttgccggtcttgcgatgattatcatataatttctgttgaattacgttaagcatgtaataattaacatgtaatgcatgacgttatttatgagatgggtttttatgattagagtcccgcaattatacatttaatacgcgatagaaaacaaaatatagcgcgcaaactaggataaattatcgcgcgcggtgtcatctatgttactag

SEQ ID NO: 3172 - DNA, 48 bp, Triticum aestivum
  source 1..48: mol_type = genomic DNA
aagaggccggcggcaaccaagaaggcgggccaggccaagaagaagaag

SEQ ID NO: 3173 - DNA, 51 bp, Triticum aestivum
  source 1..51: mol_type = genomic DNA
atggctcctaagaagaagcgcaaggttgggatccacggggttccggcggct

SEQ ID NO: 3174 - DNA, 163 bp, Triticum aestivum
  source 1..163: mol_type = genomic DNA
ctccctccgttcctaaataattgtctttctagctatctcaaataaactacaacatacggatgtatgtagacatgttttagagtgtagattcactcattttgttccgtatgtagtcatttgttgaaatctctagagagacaattatttaggaacggagggagta

SEQ ID NO: 3175 - DNA, 44 bp, Triticum aestivum
  source 1..44: mol_type = other DNA
taatttctactaagtgtagatcgagcggagggagtactagataa

SEQ ID NO: 3176 - DNA, 44 bp, Triticum aestivum
  source 1..44: mol_type = other DNA
taatttctactaagtgtagatggaacggagggagtattatctag

SEQ ID NO: 3177 - DNA, 44 bp, Triticum aestivum
  source 1..44: mol_type = other DNA
taatttctactaagtgtagatagatagctagaaagacaattatt

SEQ ID NO: 3178 - DNA, 44 bp, Triticum aestivum
  source 1..44: mol_type = other DNA
taatttctactaagtgtagattttgagatagctagaaagacaat

SEQ ID NO: 3179 - DNA, 100 bp, Triticum aestivum
  source 1..100: mol_type = other DNA
tgacaagtatttccgagcgggttttagagctagaaatagcaagttaaaataaggctagtccgttatcaacttgaaaaagtggcaccgagtcggtgctttt

SEQ ID NO: 3180 - DNA, 100 bp, Triticum aestivum
  source 1..100: mol_type = other DNA
gacaattatttaggaacggagttttagagctagaaatagcaagttaaaataaggctagtccgttatcaacttgaaaaagtggcaccgagtcggtgctttt

SEQ ID NO: 3181 - DNA, 100 bp, Triticum aestivum
  source 1..100: mol_type = other DNA
agacaattatttaggaacgggttttagagctagaaatagcaagttaaaataaggctagtccgttatcaacttgaaaaagtggcaccgagtcggtgctttt

SEQ ID NO: 3182 - DNA, 100 bp, Triticum aestivum
  source 1..100: mol_type = other DNA
gaaagacaattatttaggaagttttagagctagaaatagcaagttaaaataaggctagtccgttatcaacttgaaaaagtggcaccgagtcggtgctttt

SEQ ID NO: 3183 - DNA, 100 bp, Triticum aestivum
  source 1..100: mol_type = other DNA
agctagaaagacaattatttgttttagagctagaaatagcaagttaaaataaggctagtccgttatcaacttgaaaaagtggcaccgagtcggtgctttt

SEQ ID NO: 3184 - DNA, 100 bp, Triticum aestivum
  source 1..100: mol_type = other DNA
tttcaacaaatgactacatagttttagagctagaaatagcaagttaaaataaggctagtccgttatcaacttgaaaaagtggcaccgagtcggtgctttt

SEQ ID NO: 3185 - DNA, 100 bp, Triticum aestivum
  source 1..100: mol_type = other DNA
ctctagagagacaattatttgttttagagctagaaatagcaagttaaaataaggctagtccgttatcaacttgaaaaagtggcaccgagtcggtgctttt

SEQ ID NO: 3186 - DNA, 100 bp, Triticum aestivum
  source 1..100: mol_type = other DNA
gagagacaattatttaggaagttttagagctagaaatagcaagttaaaataaggctagtccgttatcaacttgaaaaagtggcaccgagtcggtgctttt

SEQ ID NO: 3187 - DNA, 71 bp, Triticum aestivum
  source 1..71: mol_type = genomic DNA
caaaggcttgacaatgataatgcccccgaatcttgygatagacctcatgcgctagagttgttttcctcaat

SEQ ID NO: 3188 - DNA, 71 bp, Triticum aestivum
  source 1..71: mol_type = genomic DNA
gacaaagttgaggtgaacaaaacaggcctacaatcmgctaacttacgtatatccacattagcacacaccac

SEQ ID NO: 3189 - DNA, 71 bp, Triticum aestivum
  source 1..71: mol_type = genomic DNA
aaattcgacaagtactatggctatgtctctgaatgyttgtttggttttatttgtctatattgtcgttgtat

SEQ ID NO: 3190 - DNA, 71 bp, Triticum aestivum
  source 1..71: mol_type = genomic DNA
atgcaaagtagtactcgtagagagttaacacagacsagtgatttattgggtggtattctacttgatatttg

SEQ ID NO: 3191 - DNA, 201 bp, Triticum aestivum
  source 1..201: mol_type = genomic DNA
ataaagaaaagtagaggaagcttatgaataaaatggaaaaggaattcaaaattgccgataaatataaaactcataacaaatctagccacgcaaatgcccgygccgctctgctcgtttgtacatgtctcggtggacaaggaagaacccaacaattgcacaggtcaatcttatccagcaaaacaaggaagcaaaccaaacagg

SEQ ID NO: 3192 - DNA, 80 bp, Triticum aestivum
  source 1..80: mol_type = genomic DNA
atgttgcctctcgctagccgctgtcgmacccaatgaataatgttkmtgggttctggctccgagaggatggccggctyccc

SEQ ID NO: 3193 - DNA, 53 bp, Triticum aestivum
  source 1..53: mol_type = genomic DNA
gttccttgtgacatgtactcatamacaagagccatatactccccatccttgca

SEQ ID NO: 3194 - DNA, 201 bp, Triticum aestivum
  source 1..201: mol_type = genomic DNA
gacataatgtgtaataacagcccataatgcaataaatatcaatataaaagcatgatgcaaaatggacgtatcattgccacgraaaaaatctcacaagatgwgaccatttgatcctcrtaattgttgttctagacccactcctaagtmtaacattctttatgtctatycttcaaatcccgaagagtaatgaaaactatcgaa

SEQ ID NO: 3195 - DNA, 201 bp, Triticum aestivum
  source 1..201: mol_type = genomic DNA
ccatgagtacccgctactatcgatctccctcctccctgtaggaggcctacgaacgatgccctcaggtcctgcttcctctcggtagcgatggatccacctgyggttgctctctcaggaaccagtgttggcggcggctcatccggggcgctggatcttggtgatgtgctggaacaactcaacttggaagacgaagaatttgat

SEQ ID NO: 3196 - DNA, 71 bp, Triticum aestivum
  source 1..71: mol_type = genomic DNA
gacaatatgattcaccctagatccttcaccttacarttcgaaaaaaataaaagaacaaaagtaatttgaca

SEQ ID NO: 3197 - DNA, 71 bp, Triticum aestivum
  source 1..71: mol_type = genomic DNA
acgaagatgaggaaggtcttcatgttgggtttatgrttactaatacttgcttggaatagatgtttttgatc

SEQ ID NO: 3198 - DNA, 121 bp, Triticum aestivum
  source 1..121: mol_type = genomic DNA
gttaccccaatatgctccctccttgcacattttcttcagctgcataaaaamcagaataccrcatcagttgcctgaaccttaacgcaggtgcagaaataaggcgacataatttycactaatc

SEQ ID NO: 3199 - DNA, 71 bp, Triticum aestivum
  source 1..71: mol_type = genomic DNA
aggaaaataaattgttcacaacatggacatgagaayggggcaaccaaaaagggaagaacattggaggaaac

SEQ ID NO: 3200 - DNA, 71 bp, Triticum aestivum
  source 1..71: mol_type = genomic DNA
tttgtactgcacgtagtaagtattgatttttctgtktgctctctgtggacttagatttgaaaattggcctt

SEQ ID NO: 3201 - DNA, 71 bp, Triticum aestivum
  source 1..71: mol_type = genomic DNA
atgcacattgtttccatgttaagcttatattgtgcrtaactcaaaagattgaaatggaattaccaaagggc

SEQ ID NO: 3202 - DNA, 71 bp, Triticum aestivum
  source 1..71: mol_type = genomic DNA
actgactgttggaatctgattaagacgctggagaayccgagccaagatatgtcacgactaggccatctgga

SEQ ID NO: 3203 - DNA, 71 bp, Triticum aestivum
  source 1..71: mol_type = genomic DNA
aatcagatcctgttaatgctgtagccattcttgcargcgacaccttgtcccagtcgtcttatgggcactta

SEQ ID NO: 3204 - DNA, 101 bp, Triticum aestivum
  source 1..101: mol_type = genomic DNA
ggcagagccggtcgacggagaggagcgccattcgacgcgtcttccgcaatrtgtttgcctgcttcggccgcggccattcggcgagctcccacgcttcgtcc

SEQ ID NO: 3205 - DNA, 71 bp, Triticum aestivum
  source 1..71: mol_type = genomic DNA
cgtttaaaagaacacaaatgtggccctagtgatcargtacacatatttgtcacctctttgaatcttactta

SEQ ID NO: 3206 - DNA, 108 bp, Triticum aestivum
  source 1..108: mol_type = genomic DNA
cgggctgatgaggctctcgacgtgctgcttcacaggatgcctgagctgggctgcacycccaacgtggtggcatataccacggtcatccacggcttctttaaggaaggc

SEQ ID NO: 3207 - DNA, 106 bp, Triticum aestivum
  source 1..106: mol_type = genomic DNA
gcgctatccggcgtcgtgttccctcttgggggaatcgtcctggagatggatccggtcaraggggcccgtgatttgtgaggatgtgtgtgttgtttcccgaaaggcg

SEQ ID NO: 3208 - DNA, 110 bp, Triticum aestivum
  source 1..110: mol_type = genomic DNA
ctttgaccttaaattcttgtactaatttagcagaatcgttcttcgagaagcactcmaaaaatggtttgtcttgggtctgtatcatattttctctgaacaaacaggcgtga

SEQ ID NO: 3209 - DNA, 106 bp, Triticum aestivum
  source 1..106: mol_type = genomic DNA
gacttagcctcacacggaatcgagtcaaccaattccygtcggttttgagtggctcccttgaagatgcaatcgttttcagcatggtcagattaatcagcgagcgtgc

SEQ ID NO: 3210 - DNA, 113 bp, Triticum aestivum
  source 1..113: mol_type = genomic DNA
catgtagtggctggcgtctaagcgccttttcttcttccagcatctaygacttagcctcacacggaatcgagtcaaccaattcctgtcggttttgagtggctcccttgaagatg

SEQ ID NO: 3211 - DNA, 88 bp, Triticum aestivum
  source 1..88: mol_type = genomic DNA
gtcgtatatattgtttgtattaaaaagttgtgtgttttgmgtcataatttttaaaatattattatgtcattttcaaattcgcatcaac

SEQ ID NO: 3212 - DNA, 97 bp, Triticum aestivum
  source 1..97: mol_type = genomic DNA
aatcttcttgacttcatccatccgccttgttgccctgcgcaaaatcaaactyccccgtccttatcatcaagtcaggtcccgccctgggcagagagag

SEQ ID NO: 3213 - DNA, 73 bp, Triticum aestivum
  source 1..73: mol_type = genomic DNA
cggcagatatcacaaagggctatcctggtgaacaayaagatgggtcagaatttgataatgaagcctcaagccc

SEQ ID NO: 3214 - DNA, 201 bp, Triticum aestivum
  source 1..201: mol_type = genomic DNA
aatagatgcacgcatcggcgaccattttttagtactttttgccttttttgaaaattttgtcattaaaagacaaatgcctagtctatacctgataaactaawatcatacatagagaaaatggtcatttggttgagtttcggtacatgctgagatggttgcacttcggtgcatctgctttgcttccatcacatcataatgtct

SEQ ID NO: 3215 - DNA, 65 bp, Triticum aestivum
  source 1..65: mol_type = genomic DNA
gctgcttgtagcgtcccccatggcacctgygaagaggttttcggccacagagaaggggaaggctc

SEQ ID NO: 3216 - DNA, 201 bp, Triticum aestivum
  source 1..201: mol_type = genomic DNA
aaaattacttttcacgcgcttcgttggtctgacagtgcgagcataattttactttttctcagttttacttaatttggttaaccaaatcctttttgattttkaactagaaaaccgaatgtcaaacattgtgcaaatttggaaactgaaactgaaaccaaaaacctaaaaaaatgattagtttgtttttttgttcttgtttcg

SEQ ID NO: 3217 - DNA, 66 bp, Triticum aestivum
  source 1..66: mol_type = genomic DNA
gtatttcttaggattttctcaccggcatctccrttttttgagcaagagtatttaaggatggtaggc

SEQ ID NO: 3218 - DNA, 201 bp, Triticum aestivum
  source 1..201: mol_type = genomic DNA
aacaaagatgctagtaagaacatgaacctagttgctcatttttaacaacaattgcccaccaacctgacatgctcttcccatgttctttttttgctcaaaayagagatgctagtccaaatatttttctagttgcttacattttaaacaacaattgcctaccatccttaaatactcttgctcaaaaaacggagatgccggtga

SEQ ID NO: 3219 - DNA, 60 bp, Triticum aestivum
  source 1..60: mol_type = genomic DNA
aatacagactgggtgcaaagccaagatgatwgtaaaattgattgatggccgttgggaggt

SEQ ID NO: 3220 - DNA, 201 bp, Triticum aestivum
  source 1..201: mol_type = genomic DNA
tgtaaagaagcttaaccaggaaagctatcagggccatagggaatggctggttagtgacaattttgcctgctggaaatgggatttcttgtttatttcagttytgcattgtgtctgacatgctctttcttttgggcgcaggctgaagtgaattaccttggacaactatcgcacccgaatcttgtaaagctcgttgggtactgt

SEQ ID NO: 3221 - DNA, 87 bp, Triticum aestivum
  source 1..87: mol_type = genomic DNA
tggcggagctggggctgttcctcctacgcaggcgaaacttcgccgcgataaayggaactatcatcaggttccccgatgatccatacg

SEQ ID NO: 3222 - DNA, 81 bp, Triticum aestivum
  source 1..81: mol_type = genomic DNA
acaagcaaccgagacaagttgctcttaattatctgtgcgtrcacctctaagtcttaacctgacgtaaccaaccaaccgtgt

SEQ ID NO: 3223 - DNA, 90 bp, Triticum aestivum
  source 1..90: mol_type = genomic DNA
gatggttacaaggcatgcatagcaagtagagttaacttatcaagttattrgtatttttcttctgtggtacttagagtctamagcttgagc

SEQ ID NO: 3224 - DNA, 201 bp, Triticum aestivum
  source 1..201: mol_type = genomic DNA
aatggaagctgatgtgcgttagcgataaagcaacagcgataacgacgcatggatcaccatgctacttggggaagcagggacatctgatgagccagcatacmcccagatatgtgtctttccaaattccacgtcccaacagatgagctataaattaatgccaccttcctcctacagctaaatactccatccgtttcataatgt

SEQ ID NO: 3225 - DNA, 201 bp, Triticum aestivum
  source 1..201: mol_type = genomic DNA
cagaggcattcgtgaattgggcgaaatcagaagcaaggagcagcgatgttcagcgcagaaggcactgggaggggattccagggaggctgcccaccagcccrccatcagatacggaggaggtggatccatggccctacctgtgtcctgcgccgaatctggactgtggtaactacagcgcctgaatctagaggttcagcctgg

SEQ ID NO: 3226 - DNA, 201 bp, Triticum aestivum
  source 1..201: mol_type = genomic DNA
gatccatctcccttaataattttgctattggtattgggtatggacatctgaagtgaaggttacggccgatttataggagtgatagcaccacacaattcatmagagcatctgcaatagatgagtagatgtaaaactacttaacttttacatctccgggcctaaaaacgcatctgtaataagataatgtagatgtaaagaaaa

SEQ ID NO: 3227 - DNA, 101 bp, Triticum aestivum
  source 1..101: mol_type = genomic DNA
cgacgacgacgaggatgccgagtttgatgacatggaggattatatcgacgrcgcggactgggacgccgacatgtatgatgatgtgttcgatgtctgaagga

SEQ ID NO: 3228 - DNA, 61 bp, Triticum aestivum
  source 1..61: mol_type = genomic DNA
tagccgtaggtcgtagcacatagccgtttaygtaatgcatagttgtccgaaggaatgtttc

SEQ ID NO: 3229 - DNA, 71 bp, Triticum aestivum
  source 1..71: mol_type = genomic DNA
taacctggggcttcttttttctccctataatatggrctgcccttttaagaaggaactgcagcgagggtgca

SEQ ID NO: 3230 - DNA, 71 bp, Triticum aestivum
  source 1..71: mol_type = genomic DNA
gactacgcgttcctcccggtggtggcgctctaccckttgtgttgcctttctccaagcagttgtgcccttcg

SEQ ID NO: 3231 - DNA, 71 bp, Triticum aestivum
  source 1..71: mol_type = genomic DNA
atatctttacaagtcatcgacttacatgcttctttktattatatgcacctatgcagtacttgttaatgggt

SEQ ID NO: 3232 - DNA, 71 bp, Triticum aestivum
  source 1..71: mol_type = genomic DNA
gatgatataaccgtagccaaggaagcccagattttsttctgtgtatctataggagcttaattaggaggagg

SEQ ID NO: 3233 - DNA, 71 bp, Triticum aestivum
  source 1..71: mol_type = genomic DNA
agtatataaaaaaacaagttgtcacccagatgaatycgaaactatgtcaatgtcgacggtgagtgtggacc

SEQ ID NO: 3234 - DNA, 71 bp, Triticum aestivum
  source 1..71: mol_type = genomic DNA
ggacatcggcacatgctttattactgatctgatttkttgactgtttattttaggtttgcctacaccactga

SEQ ID NO: 3235 - DNA, 201 bp, Triticum aestivum
  source 1..201: mol_type = genomic DNA
atggttgaatatgtgactgcatttggactcactccttgtttctgcatttcattgaagataagcatggccttatcaagcttcccagatttagcatgtgcatkaatcagtatgttgaagatacgacagtcaggtagaatgcagtatctttccattgaattgaagagattaatcatatcaactaagcatccttcggtggcatac

SEQ ID NO: 3236 - DNA, 71 bp, Triticum aestivum
  source 1..71: mol_type = genomic DNA
ggaggcgcctactgtattaaattagctagtgtggcktgtttgaggataatggcacatataccttggcggtg

SEQ ID NO: 3237 - DNA, 71 bp, Triticum aestivum
  source 1..71: mol_type = genomic DNA
tccaggcagggggcatcctcgacaatgatttcatckaagctgcatccccattccatcacgacgcggaggct

SEQ ID NO: 3238 - DNA, 71 bp, Triticum aestivum
  source 1..71: mol_type = genomic DNA
tgtaagctaactatacatgaagagtgcaggcacackaaaacgttcatcctgaagtacaagagttattttgg

SEQ ID NO: 3239 - DNA, 59 bp, Triticum aestivum
  source 1..59: mol_type = genomic DNA
ggagaaaggcgagattttagcacctaacgccgcaamccagatcaaatcgctgtcccttt

SEQ ID NO: 3240 - DNA, 71 bp, Triticum aestivum
  source 1..71: mol_type = genomic DNA
aaccttggaagctatcattgcgcacttgaagagcartagtgtggacattcctgtttatgcttggagcttag

SEQ ID NO: 3241 - DNA, 71 bp, Triticum aestivum
  source 1..71: mol_type = genomic DNA
cgcaggcagcgggcatgtatcctcgtctgacggatrcccagattattaaactgtcaccctgcacgcctgca

SEQ ID NO: 3242 - DNA, 298 bp, Triticum aestivum
  source 1..298: mol_type = genomic DNA
gaggctaatcccgacgtgccacattgagcacgtgtgttcttgctgtggcctggtcgaaagacatgacgcatgcacgtgccccacgcctcacacggcttgggttctcgcctgtccggtgctcgacggaccagtacatatacgcgagcgctcctrgccacctcagttcatcacacttcactgcagtacaaggcctcggctctcggcagactcctcattgctgcttctgctagtgaaaagagagattcttcagcgctgctcctgaaagagataagaaatacgatggcaacaatggtcagag

SEQ ID NO: 3243 - DNA, 150 bp, Triticum aestivum
  source 1..150: mol_type = genomic DNA
acttactgcgcgcagacgttgcagctcttcctgcagaagccaggagcttccttggtgcccaccatatagttggggttcttggcacactccccarcggcagcccactgcgagcagaggacattctcgtcctcgcagccgtcaccggagcct

SEQ ID NO: 3244 - DNA, 200 bp, Triticum aestivum
  source 1..200: mol_type = genomic DNA
aagcaagctacgcgttgctcaaaaaaaaaaaaagcaagcaagctacgctgatcaaaggctgaatagtccagagttacaggacatggctactctgcagcrcccagcaagcttactacttaggttggtggagaagcagcacccactcgagactcgacaagcaaccttggacgttctactcgccagtgcattgctgctttacc

SEQ ID NO: 3245 - DNA, 71 bp, Triticum aestivum
  source 1..71: mol_type = genomic DNA
accagagaaagagaggggaactttgggtatacaccrcattaccctagtgaaagaagaagggggtattatgt

SEQ ID NO: 3246 - DNA, 71 bp, Triticum aestivum
  source 1..71: mol_type = genomic DNA
gaagggtccactgagaattaaggatgcattctttcratttggtatatttgttgtaaggaatgaagaatcgg

SEQ ID NO: 3247 - DNA, 200 bp, Triticum aestivum
  source 1..200: mol_type = genomic DNA
tttcgtggcgggggatctcgtgccggtcgaggaggtccacctccagcgaattctgcagcaaccaacacaaacaggcccaaatgtccgaattcagagcasagcccgaccgaccgaccgcgaaatcgcgcggcatggcgttggcgtttggcgttggcgagaaggaaaaaggcactctatgcagaccttagcttggttatggc

SEQ ID NO: 3248 - DNA, 71 bp, Triticum aestivum
  source 1..71: mol_type = genomic DNA
ttgccaaattcacaccatcattgatctggggtatcstatgcctatgtgatgcctctcacctctttcttccc

SEQ ID NO: 3249 - DNA, 71 bp, Triticum aestivum
  source 1..71: mol_type = genomic DNA
ccgtgaaacctgtaaaaagatgtctgtgtgtctagsaaagccctaattttaatcaccccgtacgcccccct

SEQ ID NO: 3250 - DNA, 71 bp, Triticum aestivum
  source 1..71: mol_type = genomic DNA
gcagcttcttgtttatatattctcttatcagaagtygggtagaacagctaacgatgtgctgctcatttcct

SEQ ID NO: 3251 - DNA, 71 bp, Triticum aestivum
  source 1..71: mol_type = genomic DNA
tgatcttactgataaaatccggttcaaatatataayggtgagaaaaaattaaccagagcgaggcgagacat

SEQ ID NO: 3252 - DNA, 71 bp, Triticum aestivum
  source 1..71: mol_type = genomic DNA
gttcatgtacaatgatgtttaacattggaacggtcygggatctgtttgatctatgcccccttcaacgtctt

SEQ ID NO: 3253 - DNA, 46 bp, Triticum aestivum
  source 1..46: mol_type = other DNA
gaaggtgaccaagttcatgctgtaaaaagatgtctgtgtgtctagc

SEQ ID NO: 3254 - DNA, 46 bp, Triticum aestivum
  source 1..46: mol_type = other DNA
gaaggtgaccaagttcatgctggtgaacaaaacaggcctacaatca

SEQ ID NO: 3255 - DNA, 47 bp, Triticum aestivum
  source 1..47: mol_type = other DNA
gaaggtgaccaagttcatgctaatgatgtttaacattggaacggtcc

SEQ ID NO: 3256 - DNA, 39 bp, Triticum aestivum
  source 1..39: mol_type = other DNA
gaaggtgaccaagttcatgctgtggtggcgctctacccg

SEQ ID NO: 3257 - DNA, 47 bp, Triticum aestivum
  source 1..47: mol_type = other DNA
gaaggtgaccaagttcatgctaagtcatcgacttacatgcttctttg

SEQ ID NO: 3258 - DNA, 43 bp, Triticum aestivum
  source 1..43: mol_type = other DNA
gaaggtgaccaagttcatgctagccaaggaagcccagattttc

SEQ ID NO: 3259 - DNA, 44 bp, Triticum aestivum
  source 1..44: mol_type = other DNA
gaaggtgaccaagttcatgctaggggaactttgggtatacacca

SEQ ID NO: 3260 - DNA, 46 bp, Triticum aestivum
  source 1..46: mol_type = other DNA
gaaggtgaccaagttcatgctgttaatgctgtagccattcttgcaa

SEQ ID NO: 3261 - DNA, 47 bp, Triticum aestivum
  source 1..47: mol_type = other DNA
gaaggtgaccaagttcatgcttcagctgcataaaaamcagaatacca

SEQ ID NO: 3262 - DNA, 49 bp, Triticum aestivum
  source 1..49: mol_type = other DNA
gaaggtgaccaagttcatgctgcacgtagtaagtattgatttttctgtg

SEQ ID NO: 3263 - DNA, 54 bp, Triticum aestivum
  source 1..54: mol_type = other DNA
gaaggtgaccaagttcatgctcaaattacttttgttcttttatttttttcgaat

SEQ ID NO: 3264 - DNA, 48 bp, Triticum aestivum
  source 1..48: mol_type = other DNA
gaaggtgaccaagttcatgctaattgttcacaacatggacatgagaac

SEQ ID NO: 3265 - DNA, 51 bp, Triticum aestivum
  source 1..51: mol_type = other DNA
gaaggtgaccaagttcatgcttactgataaaatccggttcaaatatataac

SEQ ID NO: 3266 - DNA, 49 bp, Triticum aestivum
  source 1..49: mol_type = other DNA
gaaggtgaccaagttcatgctggcttcttttttctccctataatatgga

SEQ ID NO: 3267 - DNA, 43 bp, Triticum aestivum
  source 1..43: mol_type = other DNA
gaaggtgaccaagttcatgctgagaggcatcacataggcatag

SEQ ID NO: 3268 - DNA, 54 bp, Triticum aestivum
  source 1..54: mol_type = other DNA
gaaggtgaccaagttcatgctattcttcattccttacaacaaatataccaaatt

SEQ ID NO: 3269 - DNA, 48 bp, Triticum aestivum
  source 1..48: mol_type = other DNA
gaaggtgaccaagttcatgctagtagaataccacccaataaatcactg

SEQ ID NO: 3270 - DNA, 41 bp, Triticum aestivum
  source 1..41: mol_type = other DNA
gaaggtgaccaagttcatgctctagcgcatgaggtctatcg

SEQ ID NO: 3271 - DNA, 43 bp, Triticum aestivum
  source 1..43: mol_type = other DNA
gaaggtgaccaagttcatgctacatgaagagtgcaggcacacg

SEQ ID NO: 3272 - DNA, 51 bp, Triticum aestivum
  source 1..51: mol_type = other DNA
gaaggtgaccaagttcatgctattgtttccatgttaagcttatattgtgca

SEQ ID NO: 3273 - DNA, 53 bp, Triticum aestivum
  source 1..53: mol_type = other DNA
gaaggtgaccaagttcatgctaaaaacatctattccaagcaagtattagtaat

SEQ ID NO: 3274 - DNA, 51 bp, Triticum aestivum
  source 1..51: mol_type = other DNA
gaaggtgaccaagttcatgcttcttgtttatatattctcttatcagaagtc

SEQ ID NO: 3275 - DNA, 46 bp, Triticum aestivum
  source 1..46: mol_type = other DNA
gaaggtgaccaagttcatgctgaatctgattaagacgctggagaac

SEQ ID NO: 3276 - DNA, 50 bp, Triticum aestivum
  source 1..50: mol_type = other DNA
gaaggtgaccaagttcatgctgattcaaagaggtgacaaatatgtgtact

SEQ ID NO: 3277 - DNA, 44 bp, Triticum aestivum
  source 1..44: mol_type = other DNA
gaaggtgaccaagttcatgctggtcgtagcacatagccgtttac

SEQ ID NO: 3278 - DNA, 45 bp, Triticum aestivum
  source 1..45: mol_type = other DNA
gaaggtgaccaagttcatgctacggaatcgagtcaaccaattcct

SEQ ID NO: 3279 - DNA, 49 bp, Triticum aestivum
  source 1..49: mol_type = other DNA
gaaggtgaccaagttcatgctaacaacaattaygaggatcaaatggtca

SEQ ID NO: 3280 - DNA, 43 bp, Triticum aestivum
  source 1..43: mol_type = other DNA
gaaggtgaccaagttcatgctatctagccacgcaaatgcccgt

SEQ ID NO: 3281 - DNA, 46 bp, Triticum aestivum
  source 1..46: mol_type = other DNA
gaaggtgaccaagttcatgctaaagagcatgtcagacacaatgcag

SEQ ID NO: 3282 - DNA, 41 bp, Triticum aestivum
  source 1..41: mol_type = other DNA
gaaggtgaccaagttcatgctggttcctgagagagcaacca

SEQ ID NO: 3283 - DNA, 44 bp, Triticum aestivum
  source 1..44: mol_type = other DNA
gaaggtgaccaagttcatgctgacatctgatgagccagcataca

SEQ ID NO: 3284 - DNA, 48 bp, Triticum aestivum
  source 1..48: mol_type = other DNA
gaaggtgaccaagttcatgctatctactcatctattgcagatgctctt

SEQ ID NO: 3285 - DNA, 51 bp, Triticum aestivum
  source 1..51: mol_type = other DNA
gaaggtgaccaagttcatgctaaatgcctagtctatacctgataaactaaa

SEQ ID NO: 3286 - DNA, 42 bp, Triticum aestivum
  source 1..42: mol_type = other DNA
gaaggtgaccaagttcatgctacctcctccgtatctgatggc

SEQ ID NO: 3287 - DNA, 53 bp, Triticum aestivum
  source 1..53: mol_type = other DNA
gaaggtgaccaagttcatgcttaatttggttaaccaaatcctttttgattttt

SEQ ID NO: 3288 - DNA, 43 bp, Triticum aestivum
  source 1..43: mol_type = other DNA
gaaggtgaccaagttcatgcttcccagatttagcatgtgcatt

SEQ ID NO: 3289 - DNA, 47 bp, Triticum aestivum
  source 1..47: mol_type = other DNA
gaaggtgaccaagttcatgctactgtattaaattagctagtgtggcg

SEQ ID NO: 3290 - DNA, 48 bp, Triticum aestivum
  source 1..48: mol_type = other DNA
gaaggtgaccaagttcatgctaaaaacaagttgtcacccagatgaatc

SEQ ID NO: 3291 - DNA, 45 bp, Triticum aestivum
  source 1..45: mol_type = other DNA
gaaggtgaccaagttcatgctgcatcctcgacaatgatttcatcg

SEQ ID NO: 3292 - DNA, 46 bp, Triticum aestivum
  source 1..46: mol_type = other DNA
gaaggtgaccaagttcatgctagattttagcacctaacgccgcaaa

SEQ ID NO: 3293 - DNA, 44 bp, Triticum aestivum
  source 1..44: mol_type = other DNA
gaaggtgaccaagttcatgctgtcgmacccaatgaataatgttt

SEQ ID NO: 3294 - DNA, 45 bp, Triticum aestivum
  source 1..45: mol_type = other DNA
gaaggtgaccaagttcatgctgttccttgtgacatgtactcataa

SEQ ID NO: 3295 - DNA, 45 bp, Triticum aestivum
  source 1..45: mol_type = other DNA
gaaggtgaccaagttcatgctactgggtgcaaagccaagatgatt

SEQ ID NO: 3296 - DNA, 44 bp, Triticum aestivum
  source 1..44: mol_type = other DNA
gaaggtgaccaagttcatgctggcgaaacttcgccgcgataaat

SEQ ID NO: 3297 - DNA, 48 bp, Triticum aestivum
  source 1..48: mol_type = other DNA
gaaggtgaccaagttcatgctcaagttgctcttaattatctgtgcgta

SEQ ID NO: 3298 - DNA, 40 bp, Triticum aestivum
  source 1..40: mol_type = other DNA
gaaggtgaccaagttcatgctcgtcccccatggcacctgt

SEQ ID NO: 3299 - DNA, 53 bp, Triticum aestivum
  source 1..53: mol_type = other DNA
gaaggtgaccaagttcatgctatagcaagtagagttaacttatcaagttatta

SEQ ID NO: 3300 - DNA, 44 bp, Triticum aestivum
  source 1..44: mol_type = other DNA
gaaggtgaccaagttcatgctggattttctcaccggcatctcca

SEQ ID NO: 3301 - DNA, 47 bp, Triticum aestivum
  source 1..47: mol_type = other DNA
gaaggtgaccaagttcatgcttcccatgttctttttttgctcaaaac

SEQ ID NO: 3302 - DNA, 54 bp, Triticum aestivum
  source 1..54: mol_type = other DNA
gaaggtgaccaagttcatgctatattgtttgtattaaaaagttgtgtgttttga

SEQ ID NO: 3303 - DNA, 45 bp, Triticum aestivum
  source 1..45: mol_type = other DNA
gaaggtgaccaagttcatgctgccttttcttcttccagcatctac

SEQ ID NO: 3304 - DNA, 46 bp, Triticum aestivum
  source 1..46: mol_type = other DNA
gaaggtgaccaagttcatgctagaatcgttcttcgagaagcactca

SEQ ID NO: 3305 - DNA, 42 bp, Triticum aestivum
  source 1..42: mol_type = other DNA
gaaggtgaccaagttcatgctcctggagatggatccggtcag

SEQ ID NO: 3306 - DNA, 39 bp, Triticum aestivum
  source 1..39: mol_type = other DNA
gaaggtgaccaagttcatgctcctgagctgggctgcacc

SEQ ID NO: 3307 - DNA, 44 bp, Triticum aestivum
  source 1..44: mol_type = other DNA
gaaggtgaccaagttcatgctaaagggctatcctggtgaacaac

SEQ ID NO: 3308 - DNA, 45 bp, Triticum aestivum
  source 1..45: mol_type = other DNA
gaaggtgaccaagttcatgctgttgccctgcgcaaaatcaaactt

SEQ ID NO: 3309 - DNA, 46 bp, Triticum aestivum
  source 1..46: mol_type = other DNA
gaaggtgaccaagttcatgctgtactatggctatgtctctgaatgc

SEQ ID NO: 3310 - DNA, 44 bp, Triticum aestivum
  source 1..44: mol_type = other DNA
gaaggtgaccaagttcatgctcattcgacgcgtcttccgcaata

SEQ ID NO: 3311 - DNA, 47 bp, Triticum aestivum
  source 1..47: mol_type = other DNA
gaaggtgaccaagttcatgctgatgacatggaggattatatcgacga

SEQ ID NO: 3312 - DNA, 49 bp, Triticum aestivum
  source 1..49: mol_type = other DNA
gaaggtgaccaagttcatgctgcacatgctttattactgatctgatttg

SEQ ID NO: 3313 - DNA, 44 bp, Triticum aestivum
  source 1..44: mol_type = other DNA
gaaggtgaccaagttcatgctccaaatgtccgaattcagagcag

SEQ ID NO: 3314 - DNA, 42 bp, Triticum aestivum
  source 1..42: mol_type = other DNA
gaaggtgaccaagttcatgctacatatacgcgagcgctcctg

SEQ ID NO: 3315 - DNA, 42 bp, Triticum aestivum
  source 1..42: mol_type = other DNA
gaaggtgaccaagttcatgctggttcttggcacactccccag

SEQ ID NO: 3316 - DNA, 46 bp, Triticum aestivum
  source 1..46: mol_type = other DNA
gaaggtgaccaagttcatgctaacctaagtagtaagcttgctgggt

SEQ ID NO: 3317 - DNA, 46 bp, Triticum aestivum
  source 1..46: mol_type = other DNA
gaaggtcggagtcaacggattgtaaaaagatgtctgtgtgtctagg

SEQ ID NO: 3318 - DNA, 45 bp, Triticum aestivum
  source 1..45: mol_type = other DNA
gaaggtcggagtcaacggattgtgaacaaaacaggcctacaatcc

SEQ ID NO: 3319 - DNA, 48 bp, Triticum aestivum
  source 1..48: mol_type = other DNA
gaaggtcggagtcaacggattcaatgatgtttaacattggaacggtct

SEQ ID NO: 3320 - DNA, 40 bp, Triticum aestivum
  source 1..40: mol_type = other DNA
gaaggtcggagtcaacggattggtggtggcgctctaccct

SEQ ID NO: 3321 - DNA, 48 bp, Triticum aestivum
  source 1..48: mol_type = other DNA
gaaggtcggagtcaacggattcaagtcatcgacttacatgcttctttt

SEQ ID NO: 3322 - DNA, 43 bp, Triticum aestivum
  source 1..43: mol_type = other DNA
gaaggtcggagtcaacggattagccaaggaagcccagattttg

SEQ ID NO: 3323 - DNA, 43 bp, Triticum aestivum
  source 1..43: mol_type = other DNA
gaaggtcggagtcaacggattggggaactttgggtatacaccg

SEQ ID NO: 3324 - DNA, 46 bp, Triticum aestivum
  source 1..46: mol_type = other DNA
gaaggtcggagtcaacggattgttaatgctgtagccattcttgcag

SEQ ID NO: 3325 - DNA, 46 bp, Triticum aestivum
  source 1..46: mol_type = other DNA
gaaggtcggagtcaacggattcagctgcataaaaamcagaataccg

SEQ ID NO: 3326 - DNA, 49 bp, Triticum aestivum
  source 1..49: mol_type = other DNA
gaaggtcggagtcaacggattgcacgtagtaagtattgatttttctgtt

SEQ ID NO: 3327 - DNA, 54 bp, Triticum aestivum
  source 1..54: mol_type = other DNA
gaaggtcggagtcaacggattcaaattacttttgttcttttatttttttcgaac

SEQ ID NO: 3328 - DNA, 51 bp, Triticum aestivum
  source 1..51: mol_type = other DNA
gaaggtcggagtcaacggattataaattgttcacaacatggacatgagaat

SEQ ID NO: 3329 - DNA, 53 bp, Triticum aestivum
  source 1..53: mol_type = other DNA
gaaggtcggagtcaacggattcttactgataaaatccggttcaaatatataat

SEQ ID NO: 3330 - DNA, 48 bp, Triticum aestivum
  source 1..48: mol_type = other DNA
gaaggtcggagtcaacggattgcttcttttttctccctataatatggg

SEQ ID NO: 3331 - DNA, 43 bp, Triticum aestivum
  source 1..43: mol_type = other DNA
gaaggtcggagtcaacggattgagaggcatcacataggcatac

SEQ ID NO: 3332 - DNA, 51 bp, Triticum aestivum
  source 1..51: mol_type = other DNA
gaaggtcggagtcaacggattcttcattccttacaacaaatataccaaatc

SEQ ID NO: 3333 - DNA, 48 bp, Triticum aestivum
  source 1..48: mol_type = other DNA
gaaggtcggagtcaacggattagtagaataccacccaataaatcactc

SEQ ID NO: 3334 - DNA, 45 bp, Triticum aestivum
  source 1..45: mol_type = other DNA
gaaggtcggagtcaacggattaactctagcgcatgaggtctatca

SEQ ID NO: 3335 - DNA, 45 bp, Triticum aestivum
  source 1..45: mol_type = other DNA
gaaggtcggagtcaacggattatacatgaagagtgcaggcacact

SEQ ID NO: 3336 - DNA, 48 bp, Triticum aestivum
  source 1..48: mol_type = other DNA
gaaggtcggagtcaacggattgtttccatgttaagcttatattgtgcg

SEQ ID NO: 3337 - DNA, 51 bp, Triticum aestivum
  source 1..51: mol_type = other DNA
gaaggtcggagtcaacggattaaacatctattccaagcaagtattagtaac

SEQ ID NO: 3338 - DNA, 53 bp, Triticum aestivum
  source 1..53: mol_type = other DNA
gaaggtcggagtcaacggattcttcttgtttatatattctcttatcagaagtt

SEQ ID NO: 3339 - DNA, 47 bp, Triticum aestivum
  source 1..47: mol_type = other DNA
gaaggtcggagtcaacggattggaatctgattaagacgctggagaat

SEQ ID NO: 3340 - DNA, 46 bp, Triticum aestivum
  source 1..46: mol_type = other DNA
gaaggtcggagtcaacggattcaaagaggtgacaaatatgtgtacc

SEQ ID NO: 3341 - DNA, 45 bp, Triticum aestivum
  source 1..45: mol_type = other DNA
gaaggtcggagtcaacggattaggtcgtagcacatagccgtttat

SEQ ID NO: 3342 - DNA, 44 bp, Triticum aestivum
  source 1..44: mol_type = other DNA
gaaggtcggagtcaacggattcggaatcgagtcaaccaattccc

SEQ ID NO: 3343 - DNA, 49 bp, Triticum aestivum
  source 1..49: mol_type = other DNA
gaaggtcggagtcaacggattaacaacaattaygaggatcaaatggtct

SEQ ID NO: 3344 - DNA, 41 bp, Triticum aestivum
  source 1..41: mol_type = other DNA
gaaggtcggagtcaacggattctagccacgcaaatgcccgc

SEQ ID NO: 3345 - DNA, 47 bp, Triticum aestivum
  source 1..47: mol_type = other DNA
gaaggtcggagtcaacggattgaaagagcatgtcagacacaatgcaa

SEQ ID NO: 3346 - DNA, 41 bp, Triticum aestivum
  source 1..41: mol_type = other DNA
gaaggtcggagtcaacggattggttcctgagagagcaaccg

SEQ ID NO: 3347 - DNA, 44 bp, Triticum aestivum
  source 1..44: mol_type = other DNA
gaaggtcggagtcaacggattgacatctgatgagccagcatacc

SEQ ID NO: 3348 - DNA, 46 bp, Triticum aestivum
  source 1..46: mol_type = other DNA
gaaggtcggagtcaacggattctactcatctattgcagatgctctg

SEQ ID NO: 3349 - DNA, 51 bp, Triticum aestivum
  source 1..51: mol_type = other DNA
gaaggtcggagtcaacggattaaatgcctagtctatacctgataaactaat

SEQ ID NO: 3350 - DNA, 43 bp, Triticum aestivum
  source 1..43: mol_type = other DNA
gaaggtcggagtcaacggattcacctcctccgtatctgatggt

SEQ ID NO: 3351 - DNA, 52 bp, Triticum aestivum
  source 1..52: mol_type = other DNA
gaaggtcggagtcaacggattaatttggttaaccaaatcctttttgattttg

SEQ ID NO: 3352 - DNA, 45 bp, Triticum aestivum
  source 1..45: mol_type = other DNA
gaaggtcggagtcaacggattcttcccagatttagcatgtgcatg

SEQ ID NO: 3353 - DNA, 49 bp, Triticum aestivum
  source 1..49: mol_type = other DNA
gaaggtcggagtcaacggattctactgtattaaattagctagtgtggct

SEQ ID NO: 3354 - DNA, 50 bp, Triticum aestivum
  source 1..50: mol_type = other DNA
gaaggtcggagtcaacggattaaaaaaacaagttgtcacccagatgaatt

SEQ ID NO: 3355 - DNA, 46 bp, Triticum aestivum
  source 1..46: mol_type = other DNA
gaaggtcggagtcaacggattggcatcctcgacaatgatttcatct

SEQ ID NO: 3356 - DNA, 41 bp, Triticum aestivum
  source 1..41: mol_type = other DNA
gaaggtcggagtcaacggattttagcacctaacgccgcaac

SEQ ID NO: 3357 - DNA, 46 bp, Triticum aestivum
  source 1..46: mol_type = other DNA
gaaggtcggagtcaacggattctgtcgmacccaatgaataatgttc

SEQ ID NO: 3358 - DNA, 45 bp, Triticum aestivum
  source 1..45: mol_type = other DNA
gaaggtcggagtcaacggattgttccttgtgacatgtactcatac

SEQ ID NO: 3359 - DNA, 45 bp, Triticum aestivum
  source 1..45: mol_type = other DNA
gaaggtcggagtcaacggattactgggtgcaaagccaagatgata

SEQ ID NO: 3360 - DNA, 43 bp, Triticum aestivum
  source 1..43: mol_type = other DNA
gaaggtcggagtcaacggattgcgaaacttcgccgcgataaac

SEQ ID NO: 3361 - DNA, 47 bp, Triticum aestivum
  source 1..47: mol_type = other DNA
gaaggtcggagtcaacggattaagttgctcttaattatctgtgcgtg

SEQ ID NO: 3362 - DNA, 39 bp, Triticum aestivum
  source 1..39: mol_type = other DNA
gaaggtcggagtcaacggattgtcccccatggcacctgc

SEQ ID NO: 3363 - DNA, 51 bp, Triticum aestivum
  source 1..51: mol_type = other DNA
gaaggtcggagtcaacggattagcaagtagagttaacttatcaagttattg

SEQ ID NO: 3364 - DNA, 39 bp, Triticum aestivum
  source 1..39: mol_type = other DNA
gaaggtcggagtcaacggattttctcaccggcatctccg

SEQ ID NO: 3365 - DNA, 49 bp, Triticum aestivum
  source 1..49: mol_type = other DNA
gaaggtcggagtcaacggattcttcccatgttctttttttgctcaaaat

SEQ ID NO: 3366 - DNA, 54 bp, Triticum aestivum
  source 1..54: mol_type = other DNA
gaaggtcggagtcaacggattatattgtttgtattaaaaagttgtgtgttttgc

SEQ ID NO: 3367 - DNA, 46 bp, Triticum aestivum
  source 1..46: mol_type = other DNA
gaaggtcggagtcaacggattcgccttttcttcttccagcatctat

SEQ ID NO: 3368 - DNA, 44 bp, Triticum aestivum
  source 1..44: mol_type = other DNA
gaaggtcggagtcaacggattaatcgttcttcgagaagcactcc

SEQ ID NO: 3369 - DNA, 42 bp, Triticum aestivum
  source 1..42: mol_type = other DNA
gaaggtcggagtcaacggattcctggagatggatccggtcaa

SEQ ID NO: 3370 - DNA, 40 bp, Triticum aestivum
  source 1..40: mol_type = other DNA
gaaggtcggagtcaacggattgcctgagctgggctgcact

SEQ ID NO: 3371 - DNA, 46 bp, Triticum aestivum
  source 1..46: mol_type = other DNA
gaaggtcggagtcaacggattacaaagggctatcctggtgaacaat

SEQ ID NO: 3372 - DNA, 42 bp, Triticum aestivum
  source 1..42: mol_type = other DNA
gaaggtcggagtcaacggattgccctgcgcaaaatcaaactc

SEQ ID NO: 3373 - DNA, 48 bp, Triticum aestivum
  source 1..48: mol_type = other DNA
gaaggtcggagtcaacggattaagtactatggctatgtctctgaatgt

SEQ ID NO: 3374 - DNA, 40 bp, Triticum aestivum
  source 1..40: mol_type = other DNA
gaaggtcggagtcaacggattcgacgcgtcttccgcaatg

SEQ ID NO: 3375 - DNA, 46 bp, Triticum aestivum
  source 1..46: mol_type = other DNA
gaaggtcggagtcaacggattatgacatggaggattatatcgacgg

SEQ ID NO: 3376 - DNA, 50 bp, Triticum aestivum
  source 1..50: mol_type = other DNA
gaaggtcggagtcaacggattggcacatgctttattactgatctgatttt

SEQ ID NO: 3377 - DNA, 44 bp, Triticum aestivum
  source 1..44: mol_type = other DNA
gaaggtcggagtcaacggattccaaatgtccgaattcagagcac

SEQ ID NO: 3378 - DNA, 44 bp, Triticum aestivum
  source 1..44: mol_type = other DNA
gaaggtcggagtcaacggattgtacatatacgcgagcgctccta

SEQ ID NO: 3379 - DNA, 42 bp, Triticum aestivum
  source 1..42: mol_type = other DNA
gaaggtcggagtcaacggattggttcttggcacactccccaa

SEQ ID NO: 3380 - DNA, 44 bp, Triticum aestivum
  source 1..44: mol_type = other DNA
gaaggtcggagtcaacggattcctaagtagtaagcttgctgggc

SEQ ID NO: 3381 - DNA, 19 bp, Triticum aestivum
  source 1..19: mol_type = other DNA
aggggggcgtacggggtga

SEQ ID NO: 3382 - DNA, 29 bp, Triticum aestivum
  source 1..29: mol_type = other DNA
gtgtgtgctaatgtggatatacgtaagtt

SEQ ID NO: 3383 - DNA, 25 bp, Triticum aestivum
  source 1..25: mol_type = other DNA
gacgttgaagggggcatagatcaaa

SEQ ID NO: 3384 - DNA, 26 bp, Triticum aestivum
  source 1..26: mol_type = other DNA
caactgcttggagaaaggcaacacaa

SEQ ID NO: 3385 - DNA, 29 bp, Triticum aestivum
  source 1..29: mol_type = other DNA
ccattaacaagtactgcataggtgcatat

SEQ ID NO: 3386 - DNA, 28 bp, Triticum aestivum
  source 1..28: mol_type = other DNA
cctcctcctaattaagctcctatagata

SEQ ID NO: 3387 - DNA, 25 bp, Triticum aestivum
  source 1..25: mol_type = other DNA
cccccttcttctttcactagggtaa

SEQ ID NO: 3388 - DNA, 24 bp, Triticum aestivum
  source 1..24: mol_type = other DNA
gtgcccataagacgactgggacaa

SEQ ID NO: 3389 - DNA, 25 bp, Triticum aestivum
  source 1..25: mol_type = other DNA
ctgcgttaaggttcaggcaactgat

SEQ ID NO: 3390 - DNA, 29 bp, Triticum aestivum
  source 1..29: mol_type = other DNA
gccaattttcaaatctaagtccacagaga

SEQ ID NO: 3391 - DNA, 29 bp, Triticum aestivum
  source 1..29: mol_type = other DNA
atatgattcaccctagatccttcacctta

SEQ ID NO: 3392 - DNA, 21 bp, Triticum aestivum
  source 1..21: mol_type = other DNA
gtttcctccaatgttcttccc

SEQ ID NO: 3393 - DNA, 25 bp, Triticum aestivum
  source 1..25: mol_type = other DNA
tgtctcgcctcgctctggttaattt

SEQ ID NO: 3394 - DNA, 25 bp, Triticum aestivum
  source 1..25: mol_type = other DNA
accctcgctgcagttccttcttaaa

SEQ ID NO: 3395 - DNA, 29 bp, Triticum aestivum
  source 1..29: mol_type = other DNA
aaattcacaccatcattgatctggggtat

SEQ ID NO: 3396 - DNA, 29 bp, Triticum aestivum
  source 1..29: mol_type = other DNA
gtccactgagaattaaggatgcattcttt

SEQ ID NO: 3397 - DNA, 29 bp, Triticum aestivum
  source 1..29: mol_type = other DNA
aagtagtactcgtagagagttaacacaga

SEQ ID NO: 3398 - DNA, 25 bp, Triticum aestivum
  source 1..25: mol_type = other DNA
gcttgacaatgataatgcccccgaa

SEQ ID NO: 3399 - DNA, 30 bp, Triticum aestivum
  source 1..30: mol_type = other DNA
aataactcttgtacttcaggatgaacgttt

SEQ ID NO: 3400 - DNA, 29 bp, Triticum aestivum
  source 1..29: mol_type = other DNA
gccctttggtaattccatttcaatctttt

SEQ ID NO: 3401 - DNA, 26 bp, Triticum aestivum
  source 1..26: mol_type = other DNA
gatgaggaaggtcttcatgttgggtt

SEQ ID NO: 3402 - DNA, 25 bp, Triticum aestivum
  source 1..25: mol_type = other DNA
gagcagcacatcgttagctgttcta

SEQ ID NO: 3403 - DNA, 26 bp, Triticum aestivum
  source 1..26: mol_type = other DNA
cagatggcctagtcgtgacatatctt

SEQ ID NO: 3404 - DNA, 29 bp, Triticum aestivum
  source 1..29: mol_type = other DNA
taaaagaacacaaatgtggccctagtgat

SEQ ID NO: 3405 - DNA, 29 bp, Triticum aestivum
  source 1..29: mol_type = other DNA
gaaacattccttcggacaactatgcatta

SEQ ID NO: 3406 - DNA, 25 bp, Triticum aestivum
  source 1..25: mol_type = other DNA
gcatcttcaagggagccactcaaaa

SEQ ID NO: 3407 - DNA, 30 bp, Triticum aestivum
  source 1..30: mol_type = other DNA
atcattgccacgraaaaaatctcacaagat

SEQ ID NO: 3408 - DNA, 25 bp, Triticum aestivum
  source 1..25: mol_type = other DNA
ccttgtccaccgagacatgtacaaa

SEQ ID NO: 3409 - DNA, 29 bp, Triticum aestivum
  source 1..29: mol_type = other DNA
cctgctggaaatgggatttcttgtttatt

SEQ ID NO: 3410 - DNA, 23 bp, Triticum aestivum
  source 1..23: mol_type = other DNA
gcttcctctcggtagcgatggat

SEQ ID NO: 3411 - DNA, 26 bp, Triticum aestivum
  source 1..26: mol_type = other DNA
gggacgtggaatttggaaagacacat

SEQ ID NO: 3412 - DNA, 29 bp, Triticum aestivum
  source 1..29: mol_type = other DNA
tataggagtgatagcaccacacaattcat

SEQ ID NO: 3413 - DNA, 29 bp, Triticum aestivum
  source 1..29: mol_type = other DNA
tgtaccgaaactcaaccaaatgaccattt

SEQ ID NO: 3414 - DNA, 22 bp, Triticum aestivum
  source 1..22: mol_type = other DNA
cagaaggcactgggaggggatt

SEQ ID NO: 3415 - DNA, 30 bp, Triticum aestivum
  source 1..30: mol_type = other DNA
gcacaatgtttgacattcggttttctagtt

SEQ ID NO: 3416 - DNA, 29 bp, Triticum aestivum
  source 1..29: mol_type = other DNA
ctgactgtcgtatcttcaacatactgatt

SEQ ID NO: 3417 - DNA, 28 bp, Triticum aestivum
  source 1..28: mol_type = other DNA
ccaaggtatatgtgccattatcctcaaa

SEQ ID NO: 3418 - DNA, 26 bp, Triticum aestivum
  source 1..26: mol_type = other DNA
cactcaccgtcgacattgacatagtt

SEQ ID NO: 3419 - DNA, 22 bp, Triticum aestivum
  source 1..22: mol_type = other DNA
agcctccgcgtcgtgatggaat

SEQ ID NO: 3420 - DNA, 23 bp, Triticum aestivum
  source 1..23: mol_type = other DNA
aaagggacagcgatttgatctgg

SEQ ID NO: 3421 - DNA, 21 bp, Triticum aestivum
  source 1..21: mol_type = other DNA
gccatcctctcggagccagaa

SEQ ID NO: 3422 - DNA, 25 bp, Triticum aestivum
  source 1..25: mol_type = other DNA
caaggatggggagtatatggctctt

SEQ ID NO: 3423 - DNA, 25 bp, Triticum aestivum
  source 1..25: mol_type = other DNA
cctcccaacggccatcaatcaattt

SEQ ID NO: 3424 - DNA, 26 bp, Triticum aestivum
  source 1..26: mol_type = other DNA
gatcatcggggaacctgatgatagtt

SEQ ID NO: 3425 - DNA, 28 bp, Triticum aestivum
  source 1..28: mol_type = other DNA
ttggttggttacgtcaggttaagactta

SEQ ID NO: 3426 - DNA, 24 bp, Triticum aestivum
  source 1..24: mol_type = other DNA
cttctctgtggccgaaaacctctt

SEQ ID NO: 3427 - DNA, 28 bp, Triticum aestivum
  source 1..28: mol_type = other DNA
gctktagactctaagtaccacagaagaa

SEQ ID NO: 3428 - DNA, 29 bp, Triticum aestivum
  source 1..29: mol_type = other DNA
cctaccatccttaaatactcttgctcaaa

SEQ ID NO: 3429 - DNA, 30 bp, Triticum aestivum
  source 1..30: mol_type = other DNA
aagcaactagaaaaatatttggactagcat

SEQ ID NO: 3430 - DNA, 30 bp, Triticum aestivum
  source 1..30: mol_type = other DNA
gttgatgcgaatttgaaaatgacataataa

SEQ ID NO: 3431 - DNA, 25 bp, Triticum aestivum
  source 1..25: mol_type = other DNA
ttgactcgattccgtgtgaggctaa

SEQ ID NO: 3432 - DNA, 30 bp, Triticum aestivum
  source 1..30: mol_type = other DNA
aatatgatacagacccaagacaaaccattt

SEQ ID NO: 3433 - DNA, 22 bp, Triticum aestivum
  source 1..22: mol_type = other DNA
tcctcacaaatcacgggcccct

SEQ ID NO: 3434 - DNA, 24 bp, Triticum aestivum
  source 1..24: mol_type = other DNA
gaccgtggtatatgccaccacgtt

SEQ ID NO: 3435 - DNA, 29 bp, Triticum aestivum
  source 1..29: mol_type = other DNA
ggcttcattatcaaattctgacccatctt

SEQ ID NO: 3436 - DNA, 22 bp, Triticum aestivum
  source 1..22: mol_type = other DNA
gggcgggacctgacttgatgat

SEQ ID NO: 3437 - DNA, 30 bp, Triticum aestivum
  source 1..30: mol_type = other DNA
acgacaatatagacaaataaaaccaaacaa

SEQ ID NO: 3438 - DNA, 19 bp, Triticum aestivum
  source 1..19: mol_type = other DNA
ccgcggccgaagcaggcaa

SEQ ID NO: 3439 - DNA, 22 bp, Triticum aestivum
  source 1..22: mol_type = other DNA
atacatgtcggcgtcccagtcc

SEQ ID NO: 3440 - DNA, 30 bp, Triticum aestivum
  source 1..30: mol_type = other DNA
ggtgtaggcaaacctaaaataaacagtcaa

SEQ ID NO: 3441 - DNA, 22 bp, Triticum aestivum
  source 1..22: mol_type = other DNA
caacgccaaacgccaacgccat

SEQ ID NO: 3442 - DNA, 25 bp, Triticum aestivum
  source 1..25: mol_type = other DNA
gccttgtactgcagtgaagtgtgat

SEQ ID NO: 3443 - DNA, 22 bp, Triticum aestivum
  source 1..22: mol_type = other DNA
tgacggctgcgaggacgagaat

SEQ ID NO: 3444 - DNA, 25 bp, Triticum aestivum
  source 1..25: mol_type = other DNA
agtccagagttacaggacatggcta

SEQ ID NO: 3445 - DNA, 71 bp, Triticum aestivum
  source 1..71: mol_type = genomic DNA
aagtctgccatccagatcattacccaacggccaatggagccatgaggtttgcctcgttgcacgttttggct

SEQ ID NO: 3446 - DNA, 71 bp, Triticum aestivum
  source 1..71: mol_type = genomic DNA
gcaacaaagctggtcatccaaacatttacatcgttaggcaggctttccgcccaaaccatgcggccgacctg

SEQ ID NO: 3447 - DNA, 71 bp, Triticum aestivum
  source 1..71: mol_type = genomic DNA
tatgtaaaacctctttgtttctaaatagctgcggctcgctacctaaatttatgttgaacctagaggcaccc

SEQ ID NO: 3448 - DNA, 71 bp, Triticum aestivum
  source 1..71: mol_type = genomic DNA
gttcggcagaatccaagtcgcaaatgtaaggtcagcaaatgaatgatgatcatgataatgaaaatcataag

SEQ ID NO: 3449 - DNA, 71 bp, Triticum aestivum
  source 1..71: mol_type = genomic DNA
acgtatggagcttcctcttttcatcatgcaccattgtgatctccctcttattttgtctgaagccattcatg

SEQ ID NO: 3450 - DNA, 71 bp, Triticum aestivum
  source 1..71: mol_type = genomic DNA
aggtcatgaaaatgcaagtggcgaatcttatctctgttataccatttggcaaaacaaaggcgagagttctg

SEQ ID NO: 3451 - DNA, 71 bp, Triticum aestivum
  source 1..71: mol_type = genomic DNA
aagtctgccatccagatcattacccaacggccaattgagccatgaggtttgcctcgttgcacgttttggct

SEQ ID NO: 3452 - DNA, 71 bp, Triticum aestivum
  source 1..71: mol_type = genomic DNA
gcaacaaagctggtcatccaaacatttacatcgttcggcaggctttccgcccaaaccatgcggccgacctg

SEQ ID NO: 3453 - DNA, 71 bp, Triticum aestivum
  source 1..71: mol_type = genomic DNA
tatgtaaaacctctttgtttctaaatagctgcggcccgctacctaaatttatgttgaacctagaggcaccc

SEQ ID NO: 3454 - DNA, 71 bp, Triticum aestivum
  source 1..71: mol_type = genomic DNA
gttcggcagaatccaagtcgcaaatgtaaggtcagaaaatgaatgatgatcatgataatgaaaatcataag

SEQ ID NO: 3455 - DNA, 71 bp, Triticum aestivum
  source 1..71: mol_type = genomic DNA
acgtatggagcttcctcttttcatcatgcaccattatgatctccctcttattttgtctgaagccattcatg

SEQ ID NO: 3456 - DNA, 71 bp, Triticum aestivum
  source 1..71: mol_type = genomic DNA
aggtcatgaaaatgcaagtggcgaatcttatctctattataccatttggcaaaacaaaggcgagagttctg

SEQ ID NO: 3457 - DNA, 3983 bp, Triticum aestivum
  source 1..3983: mol_type = genomic DNA
aaataaagccagggactggggaatgagaagataatgtttataaggggttttctgtaaaaagaaagagcaacctacgcggcccctctgtcgatttggcatgggtcaacgcaccacacgagcaggtcaacgagcgctcgtgagaaaaaggacctagggtaaatcacttactaaagaattaggacctaaaggtgcattttggacgaaataagactaaagtgacaccctgacgaattttttaggaccttgagtgcatttaactctttcaaaaaataaagatgctaaaaaaactaaatgcttaaaaatacatttttctatgggaatacttaaaaatactagtataatttgatggcttcctagtatatttctagggcttacaactaaatttatattcttggtctaaataaaattataatctgataaattatgtgatatgaatatagccatatgagaccataatttaattttacctgcaaaaagtaagtaatagtagtagtagtactacgtactccctccgtccggaaatacttgtcgaagaatttgatgaaaatggatgcatctagaacaagaatacatctagatacatcaatctccccgacaagtatttccgaacggagggagtactagataataagataactaccctaaaaaaaaaagataactgaaggttgccacctagcacattcacattggtacaacttggaaaagcacagccccgtcgtcctgctcccagttgagttcgcgacctacacagcggccatgccccgcttctcctccaccacgccaatgtcgccaccccgcctccgcctccgactctgcgcccgccactcctcctgcacctctcatccctcacgcatctgggatccccacgccgccttcgccgccgcggcacagcgggcgagctctggcacgctcactacggaggacgcacaccacctgtttgacgaattgctgcggcggggcaatcctgtccaggagcgtcccttgaataaatttctggctgccctcgcccgcgcgcccgcgtccgcatcctgctgcgatggccccgccctggcagtcgccctcttcggccgtttgtcccaagacgtcagacgacgggtggcgcagccaaatgtcttcacctatggcgtcctcatggactgctgctgccgcgcttgccgcacagatctggcgctcgccttctttggccgtctcctcaagacgggcctggaggcaaaccaagtcgtcttcaacaccctcctcaagggcctttgccacacaaagcgggcggatgaggctctggacgtgctgcttcacaggatgcctgagctgggctgcactcctgatgtggtggcgtataacaccgttatccatggcttctttaaggaaggccatgtaagcaaggcctgcaatctgttccatgaaatggcgcagcagggcgttaagcctaatgtggtgacatataactcagttatcgatgcgctgtgcaaggccagagccatggacaaggcagaggtggtccttcgtcagatgattgatgatggtgttggaccttaatgtgacgtatagtagcctcatccatggatattcctcttcaggccactggaaggaggcagttagggtattcaaagagatgacaagtcggagggttacagcagatgtgcatacttacaacatgtttatgacctttctttgcaaacatggaagaagcaaagaagctgcaggaatttttgataccatggctatcaagggcctgaaacctgacaacgtttcatatgctattctccttcatgggtatgccgccgaaggatgcttagttgatatgattaatctcttcaattcaatggaaagagattgtattctacctgactgtcgtatcttcaacatactgattaatgcatatgctaaatctgggaagcttgataaggctatgcttatcttcaatgaaatgcagaaacaaggagtgagtccaaatgcagtcacatattcaaccgtaatacatgcattttgcaagaagggtaggttggatgatgctgtgataaagtttaatcagatgattgatacaggagtacgaccggacgcatctgtttatcgtcccctaatccagggtttttgtacacatggcgatttggtgaaagcaaaggaatatgttactgaaatgatgaagaaaggtatgcctcctcctgatattatgttcttcagttcaatcatgcagaacctatgcacagaaggaagggtaacagaagcacgggatatccttgacttgatagtgcacattggtatgaggcctaatgttatcatatttaatttgctgatcggtggatactgcctagtccgcaagatggcagatgcattgaaagtatttgatgatatggtgtcatatggtttagaaccttgtaactttacgtatggtatacttattaatggctattgcaaaaatagaaggattgatgacgggcttattctgttcaaagagatgctgcacaagggacttaaacctacaacttttaattataacgtcatactggatggattatttctggctggacaaactgttgctgcaaaagagaagtttgatgagatggttgaatctggagtaagtgtgtgcattgatacatactctataattcttggtggactttgtagaaatagctgcagtagcgaagcgatcacccttttccggaaattaagcgcaatgaatgtgaaatttgatattacaattgtcaatatcattattggtgccttatacagggtcgagagaaaccaagaggctaaggatttgtttgctgctatgccagccaatggcttggttcctaatgctgttacctacaccgtaatgatgacaaatcttataaaagaaggttcagtggaagaagctgacaatcttttcttatccatggagaagagcggctgtactgccaactcttgcctgttaaatcatatcatcagaaggttactggaaaaaggagagatagtcaaggctggaaattatatgtctaaagttgatgcaaagagctactcacttgaagctaaaactgtttcgctgctgatctctctgttttcaaggaaagggaaatatagagaacacatcaaattgcttcctacaaagtatcagtttctggaagaagcagccacagttgaatagttggtacatgatatctgaaatttaatttgcatcgcttgccatgggtccgtctgcttgtacaagaaatgcattttctatttgtaaataggaagtcagtttagaacaagccatcaggatgacgcaaagagtacaattcagttgcaccaccaataaaaaggcagaactagggctgccaaaacaacactgaatcaaaactcaaacagaaggagcagcaaactttttttttttgaagctggacagtctgctagccaaacaactacaggagactgtcaggcggggcatgtagtggctggcgtctaagcgcctttgcttcttccaccatccatggcttagcctcacacggaatcgagtcaaccaattcccgtcggttttgggtggctcccttgaagatgcaattgttttcagcggccagatacgcatggtcagattaatcagcgagtgtgccccttctgtctggttcgagaaagaatttgaagagctgagcttgtccccgctggaaccagtttgaggttagttaatcataacagggtactagagaggtgttttattgactgttgatgtgtaatatgttatatgccatcctcttgatgattacggtgatctgtgaagaggcaggatgcaaaagtgtgaatcacatatgcttatgtaattgtgttattatttgtgcagcttctagaccttttgcctgtagatggctacatggatctagttgtagcaatctgtaactgttagtgttttgtatatgctggcattgatgattagggtgacttgtgaagcatgcagaagtctgaatcatacatgcttgtctacttatttttggaactctctctttgccatgtacatgttttatgaatgcagttgt

SEQ ID NO: 3458 - protein, 258 aa, Triticum aestivum; identical to SEQ ID NO: 157

SEQ ID NO: 3459 - protein, 535 aa, Triticum aestivum; identical to SEQ ID NO: 155

SEQ ID NO: 3460 - DNA, 247 bp, Triticum aestivum
  source 1..247: mol_type = genomic DNA
ctccgtccgaaaatacttgtcgaagaatttgatgaaaatggatgcatctagaacaagaatacatctagatacatcaatctccccgacaagtatttccgaacggagggagtactagataataagataactatccaaaaaaaaaaagataactgaaggttgccacctagcacattcacattggtacaacttggaaaagcacagccccgtcgtcctgctcccagttgagttcgcgacctacacaccggcc

SEQ ID NO: 3461 - DNA, 409 bp, Triticum aestivum
  source 1..409: mol_type = genomic DNA
ctccgtccggaaatacttgtcgaagaatttgatgaaaatggatgcatctagaacaagaatacatctagatacatcaatctccctgacaagtatttccgagcggagggagtactagataatactccctccgttcctaaataattgtctttctagctatctcaaataaactacaacatacggatgtatgtagacatgttttagagtgtagattcactcattttgttccgtatgtagtcatttgttgaaatctctagagagacaattatttaggaacggagggagtaagataactaccctaaaaaaaaagataactgaaggttgccacctagcacattcacattggtacaacttggaaaagcacagccccgtcgtcctgctcccagttgagttcgcgacctacacaccggcc

SEQ ID NO: 3462 - DNA, 201 bp, Triticum aestivum; identical to SEQ ID NO: 3235
  source 1..201: mol_type = genomic DNA

SEQ ID NO: 3463 - DNA, 71 bp, Triticum aestivum; identical to SEQ ID NO: 3236
  source 1..71: mol_type = genomic DNA

SEQ ID NO: 3464 - DNA, 71 bp, Triticum aestivum; identical to SEQ ID NO: 3237
  source 1..71: mol_type = genomic DNA

SEQ ID NO: 3465 - DNA, 71 bp, Triticum aestivum; identical to SEQ ID NO: 3238
  source 1..71: mol_type = genomic DNA

SEQ ID NO: 3466 - DNA, 59 bp, Triticum aestivum; identical to SEQ ID NO: 3239
  source 1..59: mol_type = genomic DNA

SEQ ID NO: 3467 - DNA, 71 bp, Triticum aestivum; identical to SEQ ID NO: 3240
  source 1..71: mol_type = genomic DNA

SEQ ID NO: 3468 - DNA, 71 bp, Triticum aestivum; identical to SEQ ID NO: 3241
  source 1..71: mol_type = genomic DNA

SEQ ID NO: 3469 - DNA, 298 bp, Triticum aestivum; identical to SEQ ID NO: 3242
  source 1..298: mol_type = genomic DNA

SEQ ID NO: 3470 - DNA, 150 bp, Triticum aestivum; identical to SEQ ID NO: 3243
  source 1..150: mol_type = genomic DNA

SEQ ID NO: 3471 - DNA, 200 bp, Triticum aestivum; identical to SEQ ID NO: 3244
  source 1..200: mol_type = genomic DNA

SEQ ID NO: 3472 - DNA, 71 bp, Triticum aestivum; identical to SEQ ID NO: 3245
  source 1..71: mol_type = genomic DNA

SEQ ID NO: 3473 - DNA, 71 bp, Triticum aestivum; identical to SEQ ID NO: 3246
  source 1..71: mol_type = genomic DNA

SEQ ID NO: 3474 - DNA, 200 bp, Triticum aestivum; identical to SEQ ID NO: 3247
  source 1..200: mol_type = genomic DNA

SEQ ID NO: 3475 - DNA, 71 bp, Triticum aestivum; identical to SEQ ID NO: 3248
  source 1..71: mol_type = genomic DNA

SEQ ID NO: 3476 - DNA, 71 bp, Triticum aestivum; identical to SEQ ID NO: 3249
  source 1..71: mol_type = genomic DNA

SEQ ID NO: 3477 - DNA, 71 bp, Triticum aestivum; identical to SEQ ID NO: 3250
  source 1..71: mol_type = genomic DNA

SEQ ID NO: 3478 - DNA, 71 bp, Triticum aestivum; identical to SEQ ID NO: 3251
  source 1..71: mol_type = genomic DNA

SEQ ID NO: 3479 - DNA, 71 bp, Triticum aestivum; identical to SEQ ID NO: 3252
  source 1..71: mol_type = genomic DNA

1. An isolated Rf1 nucleic acid encoding a Rf1 protein restorer of fertility of T. timopheevii CMS cytoplasm, wherein the corresponding amino acid sequence has at least 95% identity to SEQ ID NO:361.

2. The isolated nucleic acid according to claim 1, comprising SEQ ID NO:3119.

3. A transgenic wheat plant comprising a Rf1 nucleic acid according to claim 1.

4. A genetically engineered wheat plant comprising a Rf1 nucleic acid according to claim 1.

5. The wheat plant according to claim 3, wherein said transgenic element(s) or genetically engineered element(s) express polypeptides which restore or improve male fertility to the plant as compared to the parent plant without such transgenic element(s) or genetically engineered element(s).

6. A wheat plant restorer of fertility of T. timopheevii CMS cytoplasm comprising a Rf1 restorer allele according to claim 1, and at least two fertility restorer alleles within the restorer loci chosen amongst Rf3, Rf4 and Rf7, wherein,
i. the Rf3 locus is located at most 10 cM from marker cfn1249269 of SEQ ID NO:3205 or marker BS00090770 of SEQ ID NO:3228,
ii. the Rf7 locus is located at most 10 cM from marker cfn0919993 of SEQ ID NO:3231, and,
iii. the Rf4 locus is located at most 10 cM from marker cfn0393953 of SEQ ID NO:3233.

7. The wheat plant according to claim 3, wherein the plant comprises Rf1, Rf3 and Rf7 restorer alleles.

8. The wheat plant according to claim 3, wherein it includes at least one Rf3 restorer allele within the Rf3 locus, said Rf3 restorer allele being located within the chromosomal fragment between SNP markers cfn1249269 and BS00090770.

9. The wheat plant according to claim 8, wherein the corresponding Amino acid sequence of Rf3 restorer allele has at least 95% identity to an amino acid selected from the group consisting of SEQ ID NO: 158, SEQ ID NO: 676 and SEQ ID NO:684.

10. The wheat plant according to claim 8, wherein said Rf3 locus comprises SEQ ID NO:1712, SEQ ID NO:3147 or SEQ ID NO:2230, SEQ ID NO:3148 or SEQ ID NO:2238.

11. The wheat plant according to claim 3, wherein it includes at least one Rf4 restorer allele encoding a Rf4 protein restorer of fertility of T. timopheevii CMS cytoplasm, wherein the corresponding amino acid sequence has at least 95% identity to an amino acid selected from the group consisting of SEQ ID NO:477 and SEQ ID NOs3136-3138.

12. The wheat plant according to claim 3, comprising Rf1, Rf3 and Rf7 restorer alleles at the same locus.

13. A method for producing a transgenic wheat plant according to claim 3, wherein the method comprises the steps of transforming a parent wheat plant with one or more nucleic acids encoding protein restorer of T. timopheevii CMS cytoplasm, selecting a plant comprising said one or more nucleic acid(s) as transgene(s), regenerating and growing said wheat transgenic plant.

14. A method for producing a genetically modified wheat plant according to claim 4, wherein the method comprises the steps of genetically modifying a parent wheat plant to obtain in their genome one or more nucleotide sequence encoding protein restorer of T. timopheevii CMS cytoplasm.

15. A method for producing the wheat plant according to claim 6, said method includes the following step:
a. providing a first wheat plant comprising one or two restorer allele selected among Rf1, Rf3 and Rf7 restorer alleles,
b. crossing said first wheat plant with a second wheat plant comprising one or two restorer alleles selected among Rf1, Rf3 and Rf7 restorer alleles, wherein Rf1, Rf3 and Rf7 restorer alleles are represented at least once in the panel of restorer alleles provided by the first plant and the second plant,
c. collecting the F1 hybrid seed,
d. obtaining homozygous plants from the F1 plants.

16. The method according to claim 13, wherein the fertility score of the obtained wheat plant has a fertility score higher than the parent wheat plant.

17. A method for producing a transgenic or genetically engineered wheat plant, wherein the fertility level of said plant is modified comprising the step of knocking-down Rf1 restorer allele expression, wherein said Rf1 restorer allele comprises a nucleic acid according to claim 1.

18. A method for modifying fertility level in a wheat plant by genome editing, comprising providing a genome editing tool capable of modulating Rf1 restorer allele expression, wherein Rf1 restorer allele comprises a nucleotide sequence as defined in claim 1.

19. A method for producing a wheat hybrid plant comprising the steps of:
a. crossing a sterile female comprising the T. timopheevii cytoplasm with a fertile male wheat plant according to claim 3; and
b. collecting the hybrid seed.

20. The method according to claim 19, further comprising the step of detecting the presence of T. timopheevii cytoplasm, and/or at least three of Rf locus chosen amongst Rf1, Rf3, Rf4 and Rf7 in the hybrid seeds.
